(19) United States
(12) Patent Application Publication
(10) Pub. No.: US 2025/0129160 A1
(43) Pub. Date: Apr. 24, 2025

(54) T CELL ENGAGER MOLECULES AND USES THEREOF

(71) Applicants: AMGEN RESEARCH (MUNICH) GmbH, Munich (DE); AMGEN INC., Thousand Oaks, CA (US)

(72) Inventors: Johannes BROZY, Munich (DE); Christoph DAHLHOFF, Geretsried (DE); Tobias RAUM, Eurasburg (DE); Jochen S. PENDZIALEK, Gauting (DE); Lisa WINKEL, Munich (DE); Marcus MUENZ, Lenggries (DE); Nathan William PIERCE, Mountain View, CA (US); Agnieszka KIELCZEWSKA, Vancouver (CA); Wentao CHEN, Thousand Oaks, CA (US); Darren L. BATES, Thousand Oaks, CA (US); Claudia BLUEMEL, Munich (DE); Jonas Karl-Josef HONER, Munich (DE)

(73) Assignees: AMGEN RESEARCH (MUNICH) GmbH, Munich (DE); AMGEN INC., Thousand Oaks, CA (US)

(21) Appl. No.: 18/566,228

(22) PCT Filed: Jun. 2, 2022
(86) PCT No.: PCT/US2022/032006

§ 371 Date: Dec. 1, 2023

Related U.S. Application Data
(60) Provisional application No. 63/236,547, filed on Aug. 24, 2021.
(60) Provisional application No. 63/197,265, filed on Jun. 4, 2021.

(51) Int. Cl. C07K 16/28

(52) U.S. Cl. CPC C07K 16/2809; C07K 16/2818; C07K 16/2827; C07K 2317/31; C07K 2317/33; C07K 2317/522; C07K 2317/55; C07K 2317/622; C07K 2317/66; C07K 2317/92

(57) ABSTRACT

The present invention provides single chain T cell engager (TCE) molecules having an scFab that binds a target antigen and an scFv that binds CD3, and TCE molecules that bind CCR8 and CD3. Methods of treating cancer are also provided.

### CROSS REFERENCE TO RELATED APPLICATIONS

[0001] This application claims the benefit of U.S. Provisional Application No. 63/197,265, filed Jun. 4, 2021, and U.S. Provisional Application No. 63/236,547, filed Aug. 24, 2021, each of which is incorporated by reference herein in its entirety.

### FIELD OF THE INVENTION

[0002] The present invention relates to the field of oncology, in particular, to bispecific T cell engager (TCE) molecules and treatment of cancer patients with said molecules.

### BACKGROUND OF THE INVENTION

[0003] The redirection of T cell activity against tumor cells by means of bispecific molecules independent of T cell receptor specificity is an evolving approach in immunooncology (Frankel S R, Baeuerle P A. Targeting T cells to tumor cells using bispecific antibodies. Curr Opin Chem Biol 2013; 17:385-92). Such new protein-based pharmaceuticals typically can simultaneously bind to two different types of antigen. They are known in several structural formats, and current applications have been explored for cancer immunotherapy and drug delivery (Fan, Gaowei; Wang, Zujian; Hao, Mingju; Li, Jinming (2015). “Bispecific antibodies and their applications”. Journal of Hematology & Oncology. 8:130).

[0004] Bispecific molecules useful in immunooncology can be antigen-binding polypeptides such as antibodies, e.g. IgG-like, i.e. full-length bispecific antibodies, or non-IgG-like bispecific antibodies, which are not full-length antibody constructs. Full length bispecific antibodies typically retain the traditional monoclonal antibody (mAb) structure of two Fab arms and one Fc region, except the two Fab sites bind different antigens. Non-full-length bispecific antibodies can lack an Fc region entirely. These include chemically linked Fabs, consisting of only the Fab regions, and various types of bivalent and trivalent single-chain variable fragments (scFvs). There are also fusion proteins mimicking the variable domains of two antibodies. An example of such a format is the bispecific T-cell engager (BiTER) (Yang, Fa; Wen, Weihong; Qin, Weijun (2016). “Bispecific Antibodies as a Development Platform for New Concepts and Treatment Strategies”. International Journal of Molecular Sciences. 18 (1): 48).

[0005] BiTE molecules are recombinant protein constructs made from two flexibly linked antibody derived binding domains. One binding domain of BiTE is specific for a selected tumor-associated surface antigen on target cells; the second binding domain is specific for CD3, a subunit of the T cell receptor complex on T cells. By their particular design, BiTE molecules are uniquely suited to transiently connect T cells with target cells and, at the same time, potently activate the inherent cytolytic potential of T cells against target cells.

[0006] There exists a need for bispecific molecules, specifically T cell engager (“TCE”) molecules, that bind a target antigen and CD3, and that demonstrate increased lysis of target cells and have desirable manufacturing properties such as increased aggregation temperatures and steeper HIC elution peak slopes. The present invention provides single-chain TCE molecules having an scFab that binds a target antigen (e.g. tumor antigen) and an scFv that binds CD3. Some TCE molecules further have an scFc, connected by a linker to the scFv, to extend the molecule half-life. The TCE molecules of the present invention demonstrate improved lysis of target cells and improved properties related to manufacturing.

[0007] The present invention also provides CCR8 TCE molecules that bind CCR8 and CD3. The C-C chemokine receptor type 8 (CCR8) is a member of the beta chemokine receptor family and is a seven transmembrane G-protein-coupled receptor with a 35 amino acid extracellular N-terminus. The ligand for CCR8 is CCL1, and CCL1-induced CCR8 signaling occurs via G-coupled proteins. CCR8 is expressed with much higher prevalence and at higher levels on the surface of cancer-resident Tregs compared to circulating or normal tissue Tregs and conventional T effector (Teff) cells. Treg cell infiltration in solid tumors is associated with poor clinical outcome, and Tregs suppress the anti-cancer immune response through inhibition of Teff cell cytotoxicity.

[0008] CCR8 TCE molecules of the present invention are thought to induce redirected T cell lysis of tumor-resident CCR8+ Tregs while sparing normal tissue Tregs that have little to no CCR8 expression. CCR8 TCE molecules of the present invention are thought to have an improved safety profile compared to other Treg-depleting therapeutic candidates targeting other markers that do not specifically deplete cancer-resident Tregs.

[0009] CCR8 TCE molecules of the present invention are single chain molecules and have either an (i) scFv that binds CCR8 and an scFv that binds CD3, wherein the two scFvs are connected by a linker; or (ii) an scFab that binds CCR8 and an scFv that binds CD3, wherein the scFab and scFv are connected by a linker. Some TCE molecules further have a scFc, connected by a linker to the scFv that binds CD3, to extend the half-life of the molecule. The CCR8 TCE molecules of the present invention demonstrate pM range cytotoxicity and bind both cynomolgus monkey and human CCR8. Interestingly, CCR8 TCE molecules were discovered that bind a unique epitope on CCR8 and do not block ligand binding to CCR8. Binding to this unique epitope is thought to contribute to high affinity and bioactivity of the TCE molecule. Binding to this unique epitope may also contribute to an acceptable pharmacokinetic profile.

### SUMMARY OF THE INVENTION

[0010] The present invention provides a T cell engager (TCE) molecule, which may be referred to as an scFab-containing TCE molecule, comprising (i) an scFab that binds a tumor antigen, wherein the scFab comprises a first heavy chain variable region (scFab VH), a CHI domain, a first light chain variable region (scFab VL), and a Ck or CA domain, and (ii) an scFv that binds CD3, comprising a second VL and a second VH, wherein the TCE molecule is a single chain. In some embodiments, the scFab comprises a C-terminus portion that is connected by a linker to an N-terminal portion of the scFv. In some embodiment the TCE molecule further comprises an scFc. In some embodiments, the scFc comprises an N-terminus portion that is connected by a linker to the C-terminal portion of the scFv. In a particular embodiment, the scFv binds human CD3. In some embodiments, the tumor antigen is CCR8.

[0011] In some embodiments, the scFab of a TCE molecule of the present invention has an orientation in the following order, from N-terminus to C-terminus, VH, CH1, VL, and either Cκ or Cλ. In other embodiments, the scFab has an orientation in the following order, from N-terminus to C-terminus, VL, either Cκ or Cλ, VH, and CH1. In some embodiments, the scFab comprises a linker that connects the CH1 and VL, wherein the linker is (G4S)6, (G4S)7, (G4S)8, (G4Q)6, (G4Q)7, or (G4Q)8. In some embodiments, the scFab comprises a linker that connects Cκ or Cλ and VH, wherein the linker is (G4S)6, (G4S)7, (G4S)8, (G4Q)6, (G4Q)7, or (G4Q)8. In some embodiments, the scFab contains a natural cysteine clamp between the heavy and light chain constant domains. In some embodiments, the TCE molecule comprises an engineered cysteine clamp in the scFab between residue 44 in the VH domain and residue 100 in the VL domain (Kabat numbering). In some embodiments, the scFab contains a natural cysteine clamp between the heavy and light chain constant domains and an engineered cysteine clamp between residue 44 in the VH domain and residue 100 in the VL domain. In some embodiments, the TCE molecule CH1, Cκ and/or Cλ domains are IgG, IgM, IgA, IgD, or IgE. In a particular embodiment, the domains are IgG. In a more particular embodiment, the domains are IgG1. In some embodiments, the domains are human. In a particular embodiment, the domains are human IgG1.

[0012] The present invention provides a single-chain TCE molecule having the following orientation, from N-terminus to C-terminus: scFab (VH, CH1, linker, VL, either Cκ or Cλ), linker, scFv (VH, linker, VL). In an embodiment, the TCE molecule further comprises a scFc, and has the following orientation: scFab (VH, CHI, linker, VL, either Cκ or Cλ), linker, scFv (VH, linker, VL), linker, Fc1 (hinge, CH2, CH3), linker, Fc2 (hinge, CH2, CH3).

[0013] The present invention provides a single-chain TCE molecule having the following orientation, from N-terminus to C-terminus: scFab (VL, either Cκ or C2, linker, VH, CH1), linker, scFv (VH, linker, VL). In an embodiment, the TCE molecule further comprises a scFc, and has the following orientation: scFab (VL, either Cκ or Cλ, linker, VH, CH1), linker, scFv (VH, linker, VL), linker, Fc1 (hinge, CH2, CH3), linker, Fc2 (hinge, CH2, CH3).

[0014] The present invention provides a single-chain TCE molecule having the following orientation: scFv that binds CCR8 (VH, linker, VL), linker, scFv that binds CD3 (VH, linker, VL). In an embodiment, the TCE molecule further comprises a scFc, and has the following orientation: scFv that binds CCR8 (VH, linker, VL), linker, scFv that binds CD3 (VH, linker, VL)-Linker-Fc1 (hinge, CH2, CH3), linker, Fc2 (hinge, CH2, CH3).

[0015] The present invention also provides a TCE molecule having the following orientation from N-terminus to C-terminus: scFv that binds CCR8 (VH, linker, VL)-Linker-scFv that binds CD3 (VH, linker, VL)-Linker-Fc1 (CH2-CH3)-Linker-Fc2 (CH2-CH3). In an embodiment, the TCE molecule binds CCR8 and CD3. The present invention provides a TCE molecule having the following orientation from N-terminus to C-terminus: scFv that binds CCR8 (VL-Linker-VH)-Linker-scFv that binds CD3 (VH-Linker-VL)-Linker-Fc1 (CH2-CH3)-Linker-Fc2 (CH2-CH3). In an embodiment, the TCE molecule binds CCR8 and CD3.

[0016] The present invention provides a single-chain TCE molecule having a scFab-scFv-scFv-scFc format. In some embodiments, the TCE molecule comprises the following orientation: VH-CH1-Linker-VL-Cκ/Cλ-Linker-VH-Linker-VL-Linker-VH-Linker-VL-Linker-Fc1-Linker-Fc2. In some embodiments, the TCE molecule comprises the following orientation: VL-Cκ/Cλ-Linker-VH-CH1-Linker-VH-Linker-VL-Linker-VH-Linker-VL-Linker-Fc1-Linker-Fc2. In some embodiments, the TCE molecule comprises the following orientation: VL-Cκ/Cλ-Linker-VH-CH1-Linker-VL-Linker-VH-Linker-VH-Linker-VL-Linker-Fc1-Linker-Fc2. In some embodiments, the TCE molecule comprises the following orientation: VH-CH1-Linker-VL-Cκ/C2-Linker-VL-Linker-VH-Linker-VH-Linker-VL-Linker-Fc1-Linker-Fc2. In some embodiments, the TCE molecule comprises Cκ. In some embodiments, the TCE molecule comprises Cλ.

[0017] The present invention also provides a single-chain TCE molecule having an scFab-scFab-scFv-scFc format. In some embodiments, the TCE molecule comprises the following orientation: VH-CH1-Linker-VL-Cκ/Cλ-Linker-VH-CH1-Linker-VL-Cκ/Cλ-Linker-VH-Linker-VL-Linker-Fc1-Linker-Fc2. In some embodiments, the TCE molecule comprises the following orientation: VL-Cκ/C2-Linker-VH-CH1-Linker-VH-CH1-Linker-VL-Cκ/Cλ-Linker-VH-Linker-VL-Linker-Fc1-Linker-Fc2. In some embodiments, the TCE molecule comprises the following orientation: VH-CH1-Linker-VL-Cκ/Cλ-Linker-VL-Cκ/Cλ-Linker-VH-CH1-Linker-VH-Linker-VL-Linker-Fc1-Linker-Fc2. In some embodiments, the TCE molecule comprises the following orientation: VL-Cκ/Cλ-Linker-VH-CH1-Linker-VL-Cκ/Cλ-Linker-VH-CH1-Linker-VH-Linker-VL-Linker-Fc1-Linker-Fc2. In some embodiments, the TCE molecule comprises Cκ. In some embodiments, the TCE molecule comprises Cλ. In some embodiments, the TCE molecule comprises Cκ and Cλ.

[0018] In an embodiment, the scFab VH and CHI of an scFab-containing TCE molecule of the present invention comprise an amino acid sequence given by SEQ ID NO: 12, SEQ ID NO: 28, SEQ ID NO: 44, SEQ ID NO: 60, SEQ ID NO: 76, SEQ ID NO: 92, SEQ ID NO: 108, or SEQ ID NO: 124. In an embodiment, the TCE molecule of the present invention comprises a Cκ. In a particular embodiment, the scFab VL and Cκ of an scFab-containing TCE molecule of the present invention comprise an amino acid sequence given by SEQ ID NO: 13, SEQ ID NO: 29, SEQ ID NO: 45, SEQ ID NO: 61, SEQ ID NO: 77, SEQ ID NO: 93, SEQ ID NO: 109, or SEQ ID NO: 125. In another particular embodiment, the TCE molecule comprises an amino acid sequence given by SEQ ID NO: 14, SEQ ID NO: 30, SEQ ID NO: 46, SEQ ID NO: 62, SEQ ID NO: 78, SEQ ID NO: 94, SEQ ID NO: 110, or SEQ ID NO: 126. In another particular embodiment, the TCE molecule comprises an amino acid sequence given by SEQ ID NO: 15, SEQ ID NO: 31, SEQ ID NO: 47, SEQ ID NO: 63, SEQ ID NO: 79, SEQ ID NO: 95, SEQ ID NO: 111, or SEQ ID NO: 127. In another particular embodiment, the TCE molecule comprises an amino acid sequence given by SEQ ID NO: 16, SEQ ID NO: 32, SEQ ID NO: 48, SEQ ID NO: 64, SEQ ID NO: 80, SEQ ID NO: 96, SEQ ID NO: 112, or SEQ ID NO: 128.

[0019] In another embodiment, the scFab VH and CHI or scFab VL and Cκ comprise a sequence of amino acids that is at least 70%, 75%, 80%, 85%, 90%, 91%, 92%, 93%, 94%, 95%, 96%, 97%, 98%, 99% or 100% identical to the sequence of a scFab VH and CHI or scFab VL and Cκ sequence listed herein. In another embodiment, the TCE molecule comprises a sequence of amino acids that is at least 70%, 75%, 80%, 85%, 90%, 91%, 92%, 93%, 94%, 95%, 96%, 97%, 98%, 99% or 100% identical to the sequence of a TCE molecule sequence listed herein.

[0020] The present invention also provides a TCE molecule comprising (i) a first scFv that binds CCR8, wherein the first scFv comprises a first VH region (CCR8 scFv VH) and a first VL region (CCR8 scFv VL), and (ii) a second scFv that binds CD3, wherein the second scFv comprises a second VH region and a second VL region. A molecule having this structure and that binds CCR8 and CD3 may be referred to as a CCR8 TCE molecule. In a preferred embodiment, the CCR8 TCE molecule is a single chain.

[0021] In an embodiment, the CCR8 TCE molecule scFv VH comprises an amino acid sequence given by SEQ ID NO: 7, SEQ ID NO: 23, SEQ ID NO: 39, SEQ ID NO: 55, SEQ ID NO: 71, SEQ ID NO: 87, SEQ ID NO: 103, or SEQ ID NO: 119, and wherein the CCR8 scFv VL comprises an amino acid sequence given by SEQ ID NO: 8, SEQ ID NO: 24, SEQ ID NO: 40, SEQ ID NO: 56, SEQ ID NO: 72, SEQ ID NO:88, SEQ ID NO: 104, or SEQ ID NO: 120. In another embodiment, the first scFv comprises an amino acid sequence given by SEQ ID NO: 9, 25, 41, 57, 73, 89, 105, or 121. In another embodiment, the TCE molecule comprises an amino acid sequence given by SEQ ID NO: 10, SEQ ID NO: 26, SEQ ID NO: 42, SEQ ID NO: 58, SEQ ID NO: 74, SEQ ID NO: 90, SEQ ID NO: 106, or SEQ ID NO: 122. In another embodiment, the TCE molecule further comprises an scFc, wherein the TCE molecule comprises an amino acid sequence given by SEQ ID NO: 11, SEQ ID NO: 27, SEQ ID NO: 59, SEQ ID NO: 75, SEQ ID NO: 91, SEQ ID NO: 107, or SEQ ID NO: 123. In another embodiment, the CCR8 scFv VH comprises a sequence of amino acids that is at least 70%, 75%, 80%, 85%, 90%, 91%, 92%, 93%, 94%, 95%, 96%, 97%, 98%, 99% or 100% identical to CCR8 scFv VH sequences listed herein. In another embodiment, the CCR8 scFv VL comprises a sequence of amino acids that is at least 70%, 75%, 80%, 85%, 90%, 91%, 92%, 93%, 94%, 95%, 96%, 97%, 98%, 99% or 100% identical to the CCR8 scFv VL sequences listed herein.

[0022] In another embodiment, the first scFv (that binds CCR8) comprises a sequence of amino acids that is at least 70%, 75%, 80%, 85%, 90%, 91%, 92%, 93%, 94%, 95%, 96%, 97%, 98%, 99% or 100% identical to the first scFv sequences listed herein.

[0023] In another embodiment, a CCR8 TCE molecule of the present invention comprises a sequence of amino acids that is at least 70%, 75%, 80%, 85%, 90%, 91%, 92%, 93%, 94%, 95%, 96%, 97%, 98%, 99% or 100% identical to CCR8 TCE molecule sequences listed herein.

[0024] In some embodiments, the first VH (scFab VH and/or CCR8 scFv VH) of a TCE molecule of the present invention comprises HCDR1, HCDR2, HCDR3, and the first VL (scFab VL and/or CCR8 scFv VL) comprises LCDR1, LCDR2, and LCDR3, and wherein:
[0025] a) HCDR1 comprises an amino acid sequence given by SEQ ID NO: 1, SEQ ID NO: 17, SEQ ID NO: 33, SEQ ID NO: 49, SEQ ID NO: 65, SEQ ID NO: 81, SEQ ID NO: 97, or SEQ ID NO: 113;
[0026] b) HCDR2 comprises an amino acid sequence given by SEQ ID NO: 2, SEQ ID NO: 18, SEQ ID NO: 34, SEQ ID NO: 50, SEQ ID NO: 66, or SEQ ID NO: 82;
[0027] c) HCDR3 comprises an amino acid sequence given by SEQ ID NO: 3, SEQ ID NO: 19, SEQ ID NO: 35, SEQ ID NO: 51, SEQ ID NO: 67, or SEQ ID NO: 83;
[0028] d) LCDR1 comprises an amino acid sequence given by SEQ ID NO: 4, SEQ ID NO: 20, SEQ ID NO: 36, SEQ ID NO: 52, SEQ ID NO: 68, or SEQ ID NO: 84;
[0029] e) LCDR2 comprises an amino acid sequence given by SEQ ID NO:5, SEQ ID NO: 21, SEQ ID NO: 37, SEQ ID NO: 53, SEQ ID NO: 69, or SEQ ID NO: 85, and
[0030] f) LCDR3 comprises an amino acid sequence given by SEQ ID NO: 6, SEQ ID NO: 22, SEQ ID NO: 38, SEQ ID NO: 54, SEQ ID NO: 70, or SEQ ID NO: 86.

[0031] In a particular embodiment, HCDR1 comprises an amino acid sequence given by SEQ ID NO: 1, HCDR2 comprises an amino acid sequence given by SEQ ID NO: 2, HCDR3 comprises an amino acid sequence given by SEQ ID NO: 3, LCDR1 comprises an amino acid sequence given by SEQ ID NO: 4, LCDR2 comprises an amino acid sequence given by SEQ ID NO: 5, and LCDR3 comprises an amino acid sequence given by SEQ ID NO: 6.

[0032] In another particular embodiment, HCDR1 comprises an amino acid sequence given by SEQ ID NO: 17, HCDR2 comprises an amino acid sequence given by SEQ ID NO: 18, HCDR3 comprises an amino acid sequence given by SEQ ID NO: 19, LCDR1 comprises an amino acid sequence given by SEQ ID NO: 20, LCDR2 comprises an amino acid sequence given by SEQ ID NO: 21, and LCDR3 comprises an amino acid sequence given by SEQ ID NO: 22.

[0033] In another particular embodiment, HCDR1 comprises an amino acid sequence given by SEQ ID NO: 33, HCDR2 comprises an amino acid sequence given by SEQ ID NO: 34, HCDR3 comprises an amino acid sequence given by SEQ ID NO: 35, LCDR1 comprises an amino acid sequence given by SEQ ID NO: 36, LCDR2 comprises an amino acid sequence given by SEQ ID NO: 37, and LCDR3 comprises an amino acid sequence given by SEQ ID NO: 38.

[0034] In yet another particular embodiment, HCDR1 comprises an amino acid sequence given by SEQ ID NO: 49, HCDR2 comprises an amino acid sequence given by SEQ ID NO: 50, HCDR3 comprises an amino acid sequence given by SEQ ID NO: 51, LCDR1 comprises an amino acid sequence given by SEQ ID NO: 52, LCDR2 comprises an amino acid sequence given by SEQ ID NO: 53, and LCDR3 comprises an amino acid sequence given by SEQ ID NO: 54.

[0035] In another particular embodiment, HCDR1 comprises an amino acid sequence given by SEQ ID NO: 65, HCDR2 comprises an amino acid sequence given by SEQ ID NO: 66, HCDR3 comprises an amino acid sequence given by SEQ ID NO: 67, LCDR1 comprises an amino acid sequence given by SEQ ID NO: 68, LCDR2 comprises an amino acid sequence given by SEQ ID NO: 69, and LCDR3 comprises an amino acid sequence given by SEQ ID NO: 70.

[0036] In another particular embodiment, HCDR1 comprises an amino acid sequence given by SEQ ID NO: 81, HCDR2 comprises an amino acid sequence given by SEQ ID NO: 82, HCDR3 comprises an amino acid sequence given by SEQ ID NO: 83, LCDR1 comprises an amino acid sequence given by SEQ ID NO: 84, LCDR2 comprises an amino acid sequence given by SEQ ID NO: 85, and LCDR3 comprises an amino acid sequence given by SEQ ID NO: 86.

[0037] In yet another particular embodiment, HCDR1 comprises an amino acid sequence given by SEQ ID NO: 97, HCDR2 comprises an amino acid sequence given by SEQ ID NO: 98, HCDR3 comprises an amino acid sequence given by SEQ ID NO: 99, LCDR1 comprises an amino acid sequence given by SEQ ID NO: 100, LCDR2 comprises an amino acid sequence given by SEQ ID NO: 101, and LCDR3 comprises an amino acid sequence given by SEQ ID NO: 102.

[0038] In another particular embodiment, HCDR1 comprises an amino acid sequence given by SEQ ID NO: 113, HCDR2 comprises an amino acid sequence given by SEQ ID NO: 114, HCDR3 comprises an amino acid sequence given by SEQ ID NO: 115, LCDR1 comprises an amino acid sequence given by SEQ ID NO: 116 or SEQ ID NO: 336 (KSSQSVLYSSNNXINYLA, wherein X1 is K or R), LCDR2 comprises an amino acid sequence given by SEQ ID NO: 117, and LCDR3 comprises an amino acid sequence given by SEQ ID NO: 118.

[0039] The present invention provides a TCE molecule comprising an orientation, from N-terminus to C-terminus, of an scFv that binds CCR8 (VH, linker, VL), linker, scFv that binds CD3 (VH, linker, VL), wherein the scFv that binds CCR8 comprises CDR1, HCDR2, HCDR3, LCDR1, LCDR2, and LCDR3 comprising amino acid residues given by SEQ ID NO: 217, SEQ ID NO: 218, SEQ ID NO: 219, SEQ ID NO: 220, SEQ ID NO: 221, and SEQ ID NO: 222, respectively. In an embodiment, the scFv that binds CCR8 comprises a VH and VL given by SEQ ID NO: 223 and SEQ ID NO: 224, respectively. In a particular embodiment, the scFv that binds CCR8 comprises amino acid residues given by SEQ ID NO: 225. In an embodiment, the TCE molecule comprises G4S linkers. In an embodiment, the TCE molecule comprises G4Q linkers. In an embodiment, the CD3-binding scFv is I2E. In another embodiment, the CD3-binding scFv is I2C. In another embodiment, the TCE molecule comprises the amino sequence given by SEQ ID NO: 226. In a further embodiment, the TCE molecule comprises the amino acid sequence given by SEQ ID NO: 227. In some such embodiments, the TCE molecule is TCE 1.1. In a preferred embodiment, the TCE molecule is a single chain. In some embodiments, the TCE molecule may have an orientation such that the VL is N-terminal to the VH.

[0040] The present invention provides a TCE molecule comprising an orientation, from N-terminus to C-terminus, of an scFv that binds CCR8 (VH, linker, VL), linker, scFv that binds CD3 (VH, linker, VL)-Linker-Fc1 (hinge, CH2, CH3), linker, Fc2 (hinge, CH2, CH3), wherein the scFv that binds CCR8 comprises CDR1, HCDR2, HCDR3, LCDR1, LCDR2, and LCDR3 comprising amino acid residues given by SEQ ID NO: 228, SEQ ID NO: 229, SEQ ID NO: 230, SEQ ID NO: 231, SEQ ID NO: 232, and SEQ ID NO: 233, respectively. In an embodiment, the scFv that binds CCR8 comprises a VH and VL given by SEQ ID NO: 234 and SEQ ID NO: 235, respectively. In a particular embodiment, the an scFv that binds CCR8 comprises amino acid residues given by SEQ ID NO: 236. In an embodiment, the TCE molecule comprises G4S linkers. In an embodiment, the TCE molecule comprises G4Q linkers. In an embodiment, the CD3-binding scFv is I2E. In another embodiment, the CD3-binding scFv is I2C. In another embodiment, the TCE molecule comprises the amino sequence given by SEQ ID NO: 237. In a further embodiment, the TCE molecule comprises the amino acid sequence given by SEQ ID NO: 238. In some such embodiments, the TCE molecule is TCE 1.2. In a preferred embodiment, the TCE molecule is a single chain. In some embodiments, the TCE molecule may have an orientation such that the VL is N-terminal to the VH.

[0041] The present invention provides a TCE molecule comprising an orientation, from N-terminus to C-terminus, of a scFab that binds CCR8 (VH, CHI, linker, VL, either Cκ or Cλ), linker, an scFv that binds CD3 (VH, linker, VL), wherein the scFab that binds CCR8 comprises CDR1, HCDR2, HCDR3, LCDR1, LCDR2, and LCDR3 comprising amino acid residues given by SEQ ID NO: 239, SEQ ID NO: 240, SEQ ID NO: 241, SEQ ID NO: 242, SEQ ID NO: 243, and SEQ ID NO: 244, respectively. In an embodiment, the scFab comprises a VH and VL given by SEQ ID NO: 245 and SEQ ID NO: 246, respectively. In a particular embodiment, the scFab comprises amino acid residues given by SEQ ID NO: 247. In an embodiment, the TCE molecule comprises G4S linkers. In an embodiment, the TCE molecule comprises G4Q linkers. In an embodiment, the CD3-binding scFv is I2E. In another embodiment, the CD3-binding scFv is I2C. In another embodiment, the TCE molecule comprises the amino sequence given by SEQ ID NO: 248. In a further embodiment, the TCE molecule comprises the amino acid sequence given by SEQ ID NO: 249. In some such embodiments, the TCE molecule is TCE 1.3. In a preferred embodiment, the TCE molecule is a single chain. In some embodiments, the TCE molecule may have an orientation such that the VL is N-terminal to the VH.

[0042] The present invention provides a TCE molecule comprising an orientation, from N-terminus to C-terminus, of scFab that binds CCR8 (VH, CH1, linker, VL, either Cκ or Cλ), linker, scFv that binds CD3 (VH, linker, VL), linker, Fc1 (hinge, CH2, CH3), linker, Fc2 (hinge, CH2, CH3), wherein the scFab that binds CCR8 comprises CDR1, HCDR2, HCDR3, LCDR1, LCDR2, and LCDR3 comprising amino acid residues given by SEQ ID NO: 250, SEQ ID NO: 251, SEQ ID NO: 252, SEQ ID NO: 253, SEQ ID NO: 254, and SEQ ID NO: 255, respectively. In an embodiment, the scFab comprises a VH and VL given by SEQ ID NO: 256 and SEQ ID NO: 257, respectively. In a particular embodiment, the scFab comprises amino acid residues given by SEQ ID NO: 258. In an embodiment, the TCE molecule comprises G4S linkers. In an embodiment, the TCE molecule comprises G4Q linkers. In an embodiment, the CD3-binding scFv is I2E. In another embodiment, the CD3-binding scFv is I2C. In another embodiment, the TCE molecule comprises the amino sequence given by SEQ ID NO: 259. In a further embodiment, the TCE molecule comprises the amino acid sequence given by SEQ ID NO: 260. In some such embodiments, the TCE molecule is TCE 1.4. In a preferred embodiment, the TCE molecule is a single chain. In some embodiments, the TCE molecule may have an orientation such that the VL is N-terminal to the VH.

[0043] The present invention further provides a TCE molecule that binds to human CCR8, which comprises an HCDR1 amino acid sequence of SEQ ID NO: 787; an HCDR2 amino acid sequence of SEQ ID NO: 788; an HCDR3 amino acid sequence of SEQ ID NO: 789; an LCDR1 amino acid sequence of SEQ ID NO: 790; an LCDR2 amino acid sequence of SEQ ID NO: 791; and an LCDR3 amino acid sequence of SEQ ID NO: 792. In some embodiments, the TCE molecule comprises a VH amino acid sequence of SEQ ID NO: 965 and a VL amino acid sequence of SEQ ID NO: 966.

[0044] The present invention further provides a TCE molecule that binds to human CCR8, which comprises an HCDR1 amino acid sequence of SEQ ID NO: 787; an HCDR2 amino acid sequence of SEQ ID NO: 788; an HCDR3 amino acid sequence of SEQ ID NO: 789; an LCDR1 amino acid sequence of SEQ ID NO: 336, wherein X1 is K or R; an LCDR2 amino acid sequence of SEQ ID NO: 791; and an LCDR3 amino acid sequence of SEQ ID NO: 792. In some embodiments, the TCE molecule comprises a VH amino acid sequence of SEQ ID NO: 965 and a VL amino acid sequence of SEQ ID NO: 342, wherein X1 is K or R, X2 is H or Q, and/or X3 is S or P.

[0045] The present invention further provides a TCE molecule that binds to human CCR8, which comprises an HCDR1 amino acid sequence of SEQ ID NO: 805, an HCDR2 amino acid sequence of SEQ ID NO: 806, an HCDR3 amino acid sequence of SEQ ID NO: 807, an LCDR1 amino acid sequence of SEQ ID NO: 808, an LCDR2 amino acid sequence of SEQ ID NO: 809, and an LCDR3 amino acid sequence of SEQ ID NO: 810.

[0046] The present invention further provides a TCE molecule that binds to human CCR8, which comprises: (a) an HCDR1 amino acid sequence of X₁X₂GX₄H, (SEQ ID NO: 1181), wherein (i) X₁ is N, S, D, G, T, or R, (ii) X₂ is C, N, Y, S, or F, and (iii) X₄ is M or F; (b) an HCDR2 amino acid sequence of SEQ ID NOs: 596, 602, 608, 614, 620, 626, 632, 638, 644, 650, 656, 662, 668, 674, 680, 686, 692, 698, 704, 710, 716, 722, 728, 734, 740, 746, 752, 758, 764, 770, 776, 782, 788, 794, 800, 806, 815, 821, 827, 833, 839, 845, 851, 857, 863, 869, 875, 881, 887, or 893, or a variant thereof that comprises 1-4 amino acid substitutions or is at least 90% identical to any one of the foregoing HCDR2 amino acid sequences; (c) an HCDR3 amino acid sequence of SEQ ID NOs: 597, 603, 609, 615, 621, 627, 633, 639, 645, 651, 657, 663, 669, 675, 681, 687, 693, 699, 705, 711, 717, 723, 729, 735, 741, 747, 753, 759, 765, 771, 777, 783, 795, 801, 807, 816, 822, 828, 834, 840, 846, 852, 858, 864, 870, 876, 882, 888, or 894 or a variant thereof that comprises 1-4 amino acid substitutions or is at least 90% identical to any one of the foregoing HCDR3 amino acid sequences; (d) an LCDR1 amino acid sequence of SEQ ID NOs: 598, 604, 610, 616, 622, 628, 634, 640, 646, 652, 658, 664, 670, 676, 682, 688, 694, 700, 706, 712, 718, 724, 730, 736, 742, 748, 754, 760, 766, 772, 778, 784, 796, 802, 808, 811, 817, 823, 829, 835, 841, 847, 853, 859, 865, 871, 877, 883, or 889 or a variant thereof that comprises 1-4 amino acid substitutions or is at least 90% identical to any one of the foregoing LCDR1 amino acid sequences; (e) an LCDR2 amino acid sequence of RX₂X₃X₄RPS (SEQ ID NO: 1182), wherein (i) X₂ is A, N, D, S, or Q, (ii) X₃ is S, T, N, I, F, or A, and (iii) X₄ is N or V; and (f) an LCDR3 amino acid sequence of SEQ ID NOs: 600, 606, 612, 618, 624, 630, 636, 642, 648, 654, 660, 666, 672, 678, 684, 690, 696, 702, 708, 714, 720, 726, 732, 738, 744, 750, 756, 762, 768, 774, 780, 786, 798, 804, 810, 813, 819, 825, 831, 837, 843, 849, 855, 861, 867, 873, 879, 885, or 891 or a variant thereof that comprises 1-4 amino acid substitutions or is at least 90% identical to any one of the foregoing LCDR3 amino acid sequences. In some embodiments, the HCDR1 comprises an amino acid sequence of SEQ ID NOs: 595, 601, 607, 613, 619, 625, 631, 637, 643, 649, 655, 661, 667, 673, 679, 685, 691, 697, 703, 709, 715, 721, 727, 733, 739, 745, 751, 757, 763, 769, 775, 781, 793, 799, 805, 814, 820, 826, 832, 838, 844, 850, 856, 862, 868, 874, 880, 886, or 892. In some embodiments, the LCDR2 comprises an amino acid sequence of SEQ ID NOs: 599, 605, 611, 617, 623, 629, 635, 641, 647, 653, 659, 665, 671, 677, 683, 689, 695, 701, 707, 713, 719, 725, 731, 737, 743, 749, 755, 761, 767, 773, 779, 785, 797, 803, 809, 812, 818, 824, 830, 836, 842, 848, 854, 860, 866, 872, 878, 884, or 890. In some embodiments, the VH comprises an amino acid sequence of SEQ ID NOs: 901, 903, 905, 907, 909, 911, 913, 915, 917, 919, 921, 923, 925, 927, 929, 931, 933, 935, 937, 939, 941, 943, 945, 947, 949, 951, 953, 955, 957, 959, 961, 963, 967, 969, 971, 974, 976, 978, 980, 982, 984, 986, 988, 990, 992, 994, 996, 998, or 1000. In some embodiments, the VL comprises an amino acid sequence of SEQ ID NOs: 912, 914, 916, 918, 920, 922, 924, 926, 928, 930, 932, 934, 936, 938, 940, 942, 944, 946, 948, 950, 952, 954, 956, 958, 960, 962, 964, 968, 970, 972, 973, 975, 977, 979, 981, 983, 985, 987, 989, 991, 993, 995, 997, or 999.

[0047] In some embodiments, the TCE molecule comprises: (a) a VH comprising an amino acid sequence of SEQ ID NO: 967 and a VL comprising an amino acid sequence of SEQ ID NO: 968; (b) a VH comprising an amino acid sequence of SEQ ID NO: 969 and a VL comprising an amino acid sequence of SEQ ID NO: 970; (c) a VH comprising an amino acid sequence of SEQ ID NO: 971 and a VL comprising an amino acid sequence of SEQ ID NO: 972; (d) a VH comprising an amino acid sequence of SEQ ID NO: 974 and a VL comprising an amino acid sequence of SEQ ID NO: 973; (e) a VH comprising an amino acid sequence of SEQ ID NO: 976 and a VL comprising an amino acid sequence of SEQ ID NO: 975; (f) a VH comprising an amino acid sequence of SEQ ID NO: 978 and a VL comprising an amino acid sequence of SEQ ID NO: 977; (g) a VH comprising an amino acid sequence of SEQ ID NO: 980 and a VL comprising an amino acid sequence of SEQ ID NO: 979; (h) a VH comprising an amino acid sequence of SEQ ID NO: 982 and a VL comprising an amino acid sequence of SEQ ID NO: 981; (i) a VH comprising an amino acid sequence of SEQ ID NO: 984 and a VL comprising an amino acid sequence of SEQ ID NO: 983; (j) a VH comprising an amino acid sequence of SEQ ID NO: 986 and a VL comprising an amino acid sequence of SEQ ID NO: 985; (k) a VH comprising an amino acid sequence of SEQ ID NO: 988 and a VL comprising an amino acid sequence of SEQ ID NO: 987; (1) a VH comprising an amino acid sequence of SEQ ID NO: 990 and a VL comprising an amino acid sequence of SEQ ID NO: 989; (m) a VH comprising an amino acid sequence of SEQ ID NO: 992 and a VL comprising an amino acid sequence of SEQ ID NO: 991; (n) a VH comprising an amino acid sequence of SEQ ID NO: 994 and a VL comprising an amino acid sequence of SEQ ID NO: 993; (0) a VH comprising an amino acid sequence of SEQ ID NO: 996 and a VL comprising an amino acid sequence of SEQ ID NO: 995; (p) a VH comprising an amino acid sequence of SEQ ID NO: 998 and a VL comprising an amino acid sequence of SEQ ID NO: 997; or (q) a VH comprising an amino acid sequence of SEQ ID NO: 1000 and a VL comprising an amino acid sequence of SEQ ID NO: 999.

[0048] In some embodiments, the TCE molecule comprises a heavy chain variable region (VH) amino acid sequence of SEQ ID NO: 965, and a light chain variable region (VL) comprising the amino acid sequence: DIVMTQSPDSLAVSLGERATINCKSSQSVLYSSNNXINYLAWYX2QKPGQX3PKLLISWA STRESGVPDRFSGSGSGTDFTLTINSLQAEDVAVYYCQQYYSIPITFGGGTKVEIKR (SEQ ID NO: 342), wherein X₁ is K or R, X₂ is H or Q, and/or X₃ is S or P. In some embodiments, a TCE molecule of the present invention comprises a YTE motif in the Fc region, corresponding to M252Y/S254T/T256E in the constant heavy chain region of IgG1 or IgG4. The YTE extends the half-life of the molecule (see e.g. Booth et al., MAbs 2018 October; 10 (7): 1098-1110). In some embodiments, the TCE molecule of the present invention comprising YTE is a TCE molecule that binds CCR8 and CD3.

[0049] In some embodiments, a TCE molecule of the present invention comprises an I2E scFv. In some embodiments, a TCE molecule of the present invention comprises an I2C scFv. The amino acid sequences of I2E are given by SEQ ID NOs. 199 to 206. The amino acid sequences of I2C are given by SEQ ID NOs. 191 to 198.

[0050] The present invention provides additional TCE molecules described in Table 25. The amino acid sequences of these TCE molecules are given by SEQ ID NOs 261 to 589 in Table 25.

[0051] The present invention also provides a method of treating cancer in a patient comprising administering an effective amount of a TCE molecule of the present invention to the patient. In an embodiment, the cancer is a solid tumor. In a particular embodiment, the cancer is non-small cell lung cancer, gastric cancer, head and neck squamous cell carcinoma, hepatocellular carcinoma, triple-negative breast cancer, colorectal cancer, pancreatic cancer, or metastatic castrate-resistant prostate cancer. In some embodiments, the method further comprises administering to the patient a PD-1 antagonist antibody or a PD-L1 antagonist antibody. In some such embodiments, the PD-1 antagonist antibody or PD-L1 antagonist antibody is administered prior to, concurrently with, and/or after administration of the TCE molecule. In particular embodiments, the PD-1 antagonist antibody is pembrolizumab, nivolumab, cemiplimab, or antibody 20C1.009. In other particular embodiments, the PD-L1 antagonist antibody is atezolizumab, avelumab, or durvalumab. In some embodiments, the method further comprises administering to the patient a chemotherapeutic agent. In some such embodiments, the chemotherapeutic agent may be administered prior to, concurrently with, or after administration of the TCE molecule. In some embodiments, the method comprises administering to the patient a TCE molecule of the present invention and a chemotherapeutic agent. In some embodiments, the method comprises administering to the patient a TCE molecule of the present invention, a PD-1 or PD-L1 antagonist antibody, and a chemotherapeutic agent.

[0052] The present invention provides a TCE molecule of the present invention for use in therapy.

[0053] The present invention also provides a TCE molecule for use in treating cancer. In an embodiment, the cancer is a solid tumor. In a particular embodiment, the cancer is non-small cell lung cancer, gastric cancer, head and neck squamous cell carcinoma, hepatocellular carcinoma, triple-negative breast cancer, colorectal cancer, pancreatic cancer, or metastatic castrate-resistant prostate cancer. In a more particular embodiment, the cancer is non-small cell lung cancer, gastric cancer, head and neck squamous cell carcinoma, hepatocellular carcinoma, or triple-negative breast cancer. In some embodiments, the use further comprises administering to the patient a PD-1 antagonist antibody or PD-L1 antagonist antibody. In some such embodiments, the PD-1 antagonist antibody or PD-L1 antagonist antibody is administered prior to, concurrently with, and/or after administration of the TCE molecule. In particular embodiments, the PD-1 antagonist antibody is pembrolizumab, nivolumab, cemiplimab, or antibody 20C1.009. In other particular embodiments, the PD-L1 antagonist antibody is atezolizumab, avelumab, or durvalumab. In some embodiments, the use further comprises administering to the patient a chemotherapeutic agent. In some such embodiments, the chemotherapeutic agent may be administered prior to, concurrently with, or after administration of the TCE molecule. In some embodiments, the use comprises administering to the patient a TCE molecule of the present invention and a chemotherapeutic agent. In some embodiments, the use comprises administering to the patient a TCE molecule of the present invention, a PD-1 or PD-L1 antagonist antibody, and a chemotherapeutic agent.

[0054] The present invention provides the use of a TCE molecule of the present invention for the manufacture of a medicament for the treatment of cancer. In an embodiment, the cancer is a solid tumor. In a particular embodiment, the cancer is non-small cell lung cancer, gastric cancer, head and neck squamous cell carcinoma, hepatocellular carcinoma, triple-negative breast cancer, colorectal cancer, pancreatic cancer, or metastatic castrate-resistant prostate cancer. In a more particular embodiment, the cancer is non-small cell lung cancer, gastric cancer, head and neck squamous cell carcinoma, hepatocellular carcinoma, or triple-negative breast cancer.

[0055] The present invention also provides a pharmaceutical composition comprising a TCE molecule of the present invention and one or more pharmaceutically acceptable carriers, diluents, or excipients.

[0056] The present invention also provides a polynucleotide that encodes an amino acid sequence of a TCE molecule of the present invention. The term “encoding” or “encodes” refers to a polynucleotide sequence encoding one or more amino acids. The term does not require a start or stop codon. The present invention encompasses nucleic acid molecules encoding anti-CCR8 TCE polypeptide sequences.

[0057] In an embodiment, the TCE molecule of the present invention is encoded by a polynucleotide sequence given by SEQ ID NO: 590. In a particular embodiment, the TCE molecule encoded by the polynucleotide sequence given by SEQ ID NO: 590 comprises the amino acid sequence given by SEQ ID NO: 227.

[0058] In an embodiment, the TCE molecule of the present invention is encoded by a polynucleotide sequence given by SEQ ID NO: 592. In a particular embodiment, the TCE molecule encoded by the polynucleotide sequence given by SEQ ID NO: 592 comprises the amino acid sequence given by SEQ ID NO: 249.

[0059] In an embodiment, the TCE molecule of the present invention is encoded by a polynucleotide sequence given by SEQ ID NO: 593. In a particular embodiment, the TCE molecule encoded by the polynucleotide sequence given by SEQ ID NO: 593 comprises the amino acid sequence given by SEQ ID NO: 260.

[0060] In an embodiment, the TCE molecule of the present invention is encoded by a polynucleotide sequence given by SEQ ID NO: 591. In a particular embodiment, the TCE molecule encoded by the polynucleotide sequence given by SEQ ID NO: 591 comprises the amino acid sequence given by SEQ ID NO: 238.

[0061] The present invention also provides a DNA molecule comprising a polynucleotide that encodes an amino acid sequence of a TCE molecule of the present invention. In an embodiment, the TCE molecule of the present invention is encoded by a polynucleotide sequence given by SEQ ID NO: 590. In a particular embodiment, the TCE molecule encoded by the polynucleotide sequence given by SEQ ID NO: 590 comprises the amino acid sequence given by SEQ ID NO: 227. In another embodiment, the TCE molecule of the present invention is encoded by a polynucleotide sequence given by SEQ ID NO: 592. In a particular embodiment, the TCE molecule encoded by the polynucleotide sequence given by SEQ ID NO: 592 comprises the amino acid sequence given by SEQ ID NO: 249. In another embodiment, the TCE molecule of the present invention is encoded by a polynucleotide sequence given by SEQ ID NO: 593. In a particular embodiment, the TCE molecule encoded by the polynucleotide sequence given by SEQ ID NO: 593 comprises the amino acid sequence given by SEQ ID NO: 260. In another embodiment, the TCE molecule of the present invention is encoded by a polynucleotide sequence given by SEQ ID NO: 591. In a particular embodiment, the TCE molecule encoded by the polynucleotide sequence given by SEQ ID NO: 591 comprises the amino acid sequence given by SEQ ID NO: 238.

[0062] The present invention further provides a mammalian cell transformed with a DNA molecule of the present invention, wherein the transformed mammalian cell is capable of expressing a TCE molecule of the present invention.

[0063] The present invention also provides a process for producing a TCE molecule of the present invention, wherein the process comprises cultivating a mammalian cell under conditions such that the TCE molecule is expressed and recovering the expressed TCE molecule. The present invention also provides a mammalian cell transformed with a DNA molecule of the present invention, wherein the transformed mammalian cell is capable of expressing a TCE molecule of the present invention. The present invention also provides a TCE molecule obtainable by the process.

[0064] In another embodiment, the present invention provides a CCR8 TCE molecule that binds human CCR8 at an epitope wherein the epitope comprises at least one residue of SEQ ID NO: 134. In an embodiment, the epitope comprises at least two residues of SEQ ID NO: 134. In an embodiment, the epitope comprises at least three residues of SEQ ID NO: 134. In an embodiment, the epitope comprises at least four residues of SEQ ID NO: 134. In an embodiment, the epitope comprises at least five residues of SEQ ID NO: 134. In an embodiment, the epitope comprises six or more residues of SEQ ID NO: 134. In an embodiment, the epitope comprises seven or more residues of SEQ ID NO: 134. In an embodiment, the epitope comprises eight or more residues of SEQ ID NO: 134. In an embodiment, the epitope comprises nine or more residues of SEQ ID NO: 134. In an embodiment, the epitope comprises ten or more residues of SEQ ID NO: 134. In an embodiment, the epitope comprises eleven or more residues of SEQ ID NO: 134. In an embodiment, the epitope comprises twelve residues of SEQ ID NO: 134. In a particular embodiment, the epitope comprises the threonine residue at position 4 of SEQ ID NO: 134. The term “epitope” as used herein refers to sites of an antigen that are in contact with (e.g. binds) the molecule. The epitope may be determined by a method known to a person of ordinary skill, including flow cytometry of bound TCE molecule to peptides, hydrogen-deuterium exchange, alanine scanning, and/or x-ray crystallography. In an embodiment, the epitope is determined by epitope binning. In an embodiment, the epitope is determined by TCE molecule binding to CCR8 peptide-nanobody complexes. In an embodiment, the epitope is determined by screening TCE molecule binding to CCR8 by phage display. In an embodiment, the epitope is determined by determining binding to a CCR8 peptide expressed in human cells, wherein the peptide comprises an amino acid sequence given by SEQ ID NO: 134 or amino acid residues 1-12 of SEQ ID NO: 133. In some embodiments, the epitope is determined by anti-CCR8 TCE molecule binding to the T4R mutation in cynomolgus monkey CCR8. In an embodiment, binding to the T4R mutation is determined in a cell based affinity assay, wherein TCE molecule binding to cells expressing cynomolgus monkey cells CCR8 containing a T4R mutation is compared to TCE molecule binding to cells expressing wild-type cynomolgus monkey CCR8 (comprising a threonine at position four). In some embodiments, an anti-CCR8 TCE molecule binds threonine at position four if it shows reduced binding to CCR8 comprising a T4R mutation. In particular embodiments, an anti-CCR8 TCE molecule binds threonine at position four if it shows no detectable binding to CCR8 comprising a T4R mutation. In some embodiments, wild-type cynomolgus monkey CCR8 comprises an amino acid sequence given by SEQ ID NO: 129. In some embodiments, cynomolgus monkey CCR8 comprising a T4R mutation comprises an amino acid sequence given by SEQ ID NO: 130.

[0065] The present invention provides a method of treating cancer in a patient comprising administering to the patient an effective amount of a CCR8 TCE molecule that binds human CCR8 at an epitope wherein the epitope comprises at least one residue of SEQ ID NO: 134. In an embodiment, the epitope comprises at least two residues of SEQ ID NO: 134. In an embodiment, the epitope comprises at least three residues of SEQ ID NO: 134. In an embodiment, the epitope comprises at least four residues of SEQ ID NO: 134. In an embodiment, the epitope comprises at least five residues of SEQ ID NO: 134. In an embodiment, the epitope comprises six or more residues of SEQ ID NO: 134. In an embodiment, the epitope comprises seven or more residues of SEQ ID NO: 134. In an embodiment, the epitope comprises eight or more residues of SEQ ID NO: 134. In an embodiment, the epitope comprises nine or more residues of SEQ ID NO: 134. In an embodiment, the epitope comprises ten or more residues of SEQ ID NO: 134. In an embodiment, the epitope comprises eleven or more residues of SEQ ID NO: 134. In an embodiment, the epitope comprises twelve residues of SEQ ID NO: 134. In an embodiment, the epitope comprises a threonine residue at position 4 of SEQ ID NO: 134. In an embodiment, the epitope is determined by epitope binning. In an embodiment, the epitope is determined by TCE molecule binding to CCR8 peptide-nanobody complexes. In an embodiment, the epitope is determined by screening TCE molecule binding to CCR8 by phage display. In an embodiment, the epitope is determined by determining binding to a CCR8 peptide expressed in human cells, wherein the peptide comprises an amino acid sequence given by SEQ ID NO: 134 or amino acid residues 1-12 of SEQ ID NO: 133. In some embodiments, the epitope is determined by anti-CCR8 TCE molecule binding to the T4R mutation in cynomolgus monkey CCR8. In an embodiment, binding to the T4R mutation is determined in a cell based affinity assay, wherein TCE molecule binding to cells expressing cynomolgus monkey cells CCR8 containing a T4R mutation is compared to TCE molecule binding to cells expressing wild-type cynomolgus monkey CCR8 (comprising a threonine at position four). In some embodiments, an anti-CCR8 TCE molecule binds threonine at position four if it shows reduced binding to CCR8 comprising a T4R mutation. In particular embodiments, an anti-CCR8 TCE molecule binds threonine at position four if it shows no detectable binding to CCR8 comprising a T4R mutation. In some embodiments, wild-type cynomolgus monkey CCR8 comprises an amino acid sequence given by SEQ ID NO: 129. In some embodiments, cynomolgus monkey CCR8 comprising a T4R mutation comprises an amino acid sequence given by SEQ ID NO: 130.

[0066] In another embodiment, the present invention provides a CCR8 TCE molecule that binds human CCR8 at an epitope wherein the epitope consists of one residue of SEQ ID NO: 134. In an embodiment, the epitope consists of two residues of SEQ ID NO: 134. In an embodiment, the epitope consists of three residues of SEQ ID NO: 134. In an embodiment, the epitope consists of four residues of SEQ ID NO: 134. In an embodiment, the epitope consists of five residues of SEQ ID NO: 134. In an embodiment, the epitope consists of six residues of SEQ ID NO: 134. In an embodiment, the epitope consists of seven residues of SEQ ID NO: 134. In an embodiment, the epitope consists of eight residues of SEQ ID NO: 134. In an embodiment, the epitope consists of nine residues of SEQ ID NO: 134. In an embodiment, the epitope consists of ten residues of SEQ ID NO: 134. In an embodiment, the epitope consists of eleven residues of SEQ ID NO: 134. In an embodiment, the epitope consists of twelve residues of SEQ ID NO: 134. In an embodiment, the epitope consists of a threonine residue at position 4 of SEQ ID NO: 134.

[0067] The present invention provides a method of treating cancer in a patient comprising administering to the patient an effective amount of a CCR8 TCE molecule that binds human CCR8 at an epitope wherein the epitope consists of one residue of SEQ ID NO: 134. In an embodiment, the epitope consists of two residues of SEQ ID NO: 134. In an embodiment, the epitope consists of three residues of SEQ ID NO: 134. In an embodiment, the epitope consists of four residues of SEQ ID NO: 134. In an embodiment, the epitope consists of five residues of SEQ ID NO: 134. In an embodiment, the epitope consists of six residues of SEQ ID NO: 134. In an embodiment, the epitope consists of seven residues of SEQ ID NO: 134. In an embodiment, the epitope consists of eight residues of SEQ ID NO: 134. In an embodiment, the epitope consists of nine residues of SEQ ID NO: 134. In an embodiment, the epitope consists of ten residues of SEQ ID NO: 134. In an embodiment, the epitope consists of eleven residues of SEQ ID NO: 134. In an embodiment, the epitope consists of twelve residues of SEQ ID NO: 134. In an embodiment, the epitope consists of a threonine residue at position 4 of SEQ ID NO: 134.

[0068] In another embodiment, the present invention provides a CCR8 TCE molecule that binds human CCR8 at an epitope wherein the epitope comprises at least one residue of amino acid residues 1-12 OF SEQ ID NO: 133. In an embodiment, the epitope comprises at least two residues of amino acid residues 1-12 OF SEQ ID NO: 133. In an embodiment, the epitope comprises at least three residues of amino acid residues 1-12 OF SEQ ID NO: 133. In an embodiment, the epitope comprises at least four residues of amino acid residues 1-12 OF SEQ ID NO: 133. In an embodiment, the epitope comprises at least five residues of amino acid residues 1-12 OF SEQ ID NO: 133. In an embodiment, the epitope comprises six or more residues of amino acid residues 1-12 OF SEQ ID NO: 133. In an embodiment, the epitope comprises seven or more residues of amino acid residues 1-12 OF SEQ ID NO: 133. In an embodiment, the epitope comprises eight or more residues of amino acid residues 1-12 OF SEQ ID NO: 133. In an embodiment, the epitope comprises nine or more residues of amino acid residues 1-12 of SEQ ID NO: 133. In an embodiment, the epitope comprises ten or more residues amino acid residues 1-12 of SEQ ID NO: 133. In an embodiment, the epitope comprises eleven or more residues of amino acid residues 1-12 OF SEQ ID NO: 133. In an embodiment, the epitope comprises twelve residues of amino acid residues 1-12 OF SEQ ID NO: 133. In a particular embodiment, the epitope comprises the threonine residue at position 4 of amino acid residues 1-12 OF SEQ ID NO: 133. The term “epitope” as used herein refers to sites of an antigen that are in contact with (e.g. binds) the molecule. The epitope may be determined by a method known to a person of ordinary skill, including flow cytometry of bound TCE molecule to peptides, hydrogen-deuterium exchange, alanine scanning, and/or x-ray crystallography. In an embodiment, the epitope is determined by epitope binning. In an embodiment, the epitope is determined by TCE molecule binding to CCR8 peptide-nanobody complexes. In an embodiment, the epitope is determined by screening TCE molecule binding to CCR8 by phage display. In an embodiment, the epitope is determined by determining binding to a CCR8 peptide expressed in human cells, wherein the peptide comprises an amino acid sequence given by SEQ ID NO: 134 or amino acid residues 1-12 of SEQ ID NO: 133. In some embodiments, the epitope is determined by anti-CCR8 TCE molecule binding to the T4R mutation in cynomolgus monkey CCR8. In an embodiment, binding to the T4R mutation is determined in a cell based affinity assay, wherein TCE molecule binding to cells expressing cynomolgus monkey cells CCR8 containing a T4R mutation is compared to TCE molecule binding to cells expressing wild-type cynomolgus monkey CCR8 (comprising a threonine at position four). In some embodiments, an anti-CCR8 TCE molecule binds threonine at position four if it shows reduced binding to CCR8 comprising a T4R mutation. In particular embodiments, an anti-CCR8 TCE molecule binds threonine at position four if it shows no detectable binding to CCR8 comprising a T4R mutation. In some embodiments, wild-type cynomolgus monkey CCR8 comprises an amino acid sequence given by SEQ ID NO: 129. In some embodiments, cynomolgus monkey CCR8 comprising a T4R mutation comprises an amino acid sequence given by SEQ ID NO: 130.

[0069] The present invention provides a method of treating cancer in a patient comprising administering to the patient an effective amount of a CCR8 TCE molecule that binds human CCR8 at an epitope wherein the epitope comprises at least one residue of amino acid residues 1-12 OF SEQ ID NO: 133. In an embodiment, the epitope comprises at least two residues of amino acid residues 1-12 OF SEQ ID NO: 133. In an embodiment, the epitope comprises at least three residues of amino acid residues 1-12 OF SEQ ID NO: 133. In an embodiment, the epitope comprises at least four residues of amino acid residues 1-12 OF SEQ ID NO: 133. In an embodiment, the epitope comprises at least five residues of amino acid residues 1-12 OF SEQ ID NO: 133. In an embodiment, the epitope comprises six or more residues of amino acid residues 1-12 OF SEQ ID NO: 133. In an embodiment, the epitope comprises seven or more residues of amino acid residues 1-12 OF SEQ ID NO: 133. In an embodiment, the epitope comprises eight or more residues of amino acid residues 1-12 OF SEQ ID NO: 133. In an embodiment, the epitope comprises nine or more residues of amino acid residues 1-12 of SEQ ID NO: 133. In an embodiment, the epitope comprises ten or more residues amino acid residues 1-12 of SEQ ID NO: 133. In an embodiment, the epitope comprises eleven or more residues of amino acid residues 1-12 OF SEQ ID NO: 133. In an embodiment, the epitope comprises twelve residues of amino acid residues 1-12 OF SEQ ID NO: 133. In an embodiment, the epitope comprises a threonine residue at position 4 of amino acid residues 1-12 OF SEQ ID NO: 133. In an embodiment, the epitope is determined by epitope binning. In an embodiment, the epitope is determined by TCE molecule binding to CCR8 peptide-nanobody complexes. In an embodiment, the epitope is determined by screening TCE molecule binding to CCR8 by phage display. In an embodiment, the epitope is determined by determining binding to a CCR8 peptide expressed in human cells, wherein the peptide comprises an amino acid sequence given by SEQ ID NO: 134 or amino acid residues 1-12 of SEQ ID NO: 133. In some embodiments, the epitope is determined by anti-CCR8 TCE molecule binding to the T4R mutation in cynomolgus monkey CCR8. In an embodiment, binding to the T4R mutation is determined in a cell based affinity assay, wherein TCE molecule binding to cells expressing cynomolgus monkey cells CCR8 containing a T4R mutation is compared to TCE molecule binding to cells expressing wild-type cynomolgus monkey CCR8 (comprising a threonine at position four). In some embodiments, an anti-CCR8 TCE molecule binds threonine at position four if it shows reduced binding to CCR8 comprising a T4R mutation. In particular embodiments, an anti-CCR8 TCE molecule binds threonine at position four if it shows no detectable binding to CCR8 comprising a T4R mutation. In some embodiments, wild-type cynomolgus monkey CCR8 comprises an amino acid sequence given by SEQ ID NO: 129. In some embodiments, cynomolgus monkey CCR8 comprising a T4R mutation comprises an amino acid sequence given by SEQ ID NO: 130.

[0070] In another embodiment, the present invention provides a CCR8 TCE molecule that binds human CCR8 at an epitope wherein the epitope consists of at least one residue of amino acid residues 1-12 OF SEQ ID NO: 133. In an embodiment, the epitope consists of two residues of amino acid residues 1-12 OF SEQ ID NO: 133. In an embodiment, the epitope consists of three residues of amino acid residues 1-12 OF SEQ ID NO: 133. In an embodiment, the epitope consists of four residues of amino acid residues 1-12 OF SEQ ID NO: 133. In an embodiment, the epitope consists of five residues of amino acid residues 1-12 OF SEQ ID NO: 133. In an embodiment, the epitope consists of six residues of amino acid residues 1-12 OF SEQ ID NO: 133. In an embodiment, the epitope consists of seven residues of amino acid residues 1-12 OF SEQ ID NO: 133. In an embodiment, the epitope consists of eight residues of amino acid residues 1-12 OF SEQ ID NO: 133. In an embodiment, the epitope consists of nine residues of amino acid residues 1-12 OF SEQ ID NO: 133. In an embodiment, the epitope consists of ten residues of amino acid residues 1-12 OF SEQ ID NO: 133. In an embodiment, the epitope consists of eleven residues of amino acid residues 1-12 OF SEQ ID NO: 133. In an embodiment, the epitope consists of twelve residues of amino acid residues 1-12 OF SEQ ID NO: 133. In an embodiment, the epitope consists of a threonine residue at position 4 of amino acid residues 1-12 OF SEQ ID NO: 133.

[0071] The present invention provides a method of treating cancer in a patient comprising administering to the patient an effective amount of a CCR8 TCE molecule that binds human CCR8 at an epitope wherein the epitope consists of one residue of amino acid residues 1-12 OF SEQ ID NO: 133. In an embodiment, the epitope consists of two residues of amino acid residues 1-12 OF SEQ ID NO: 133. In an embodiment, the epitope consists of three residues of amino acid residues 1-12 OF SEQ ID NO: 133. In an embodiment, the epitope consists of four residues of amino acid residues 1-12 OF SEQ ID NO: 133. In an embodiment, the epitope consists of five residues of amino acid residues 1-12 OF SEQ ID NO: 133. In an embodiment, the epitope consists of six residues of amino acid residues 1-12 OF SEQ ID NO: 133. In an embodiment, the epitope consists of seven residues of amino acid residues 1-12 OF SEQ ID NO: 133. In an embodiment, the epitope consists of eight residues of amino acid residues 1-12 OF SEQ ID NO: 133. In an embodiment, the epitope consists of nine residues of amino acid residues 1-12 OF SEQ ID NO: 133. In an embodiment, the epitope consists of ten residues of amino acid residues 1-12 OF SEQ ID NO: 133. In an embodiment, the epitope consists of eleven residues of amino acid residues 1-12 OF SEQ ID NO: 133. In an embodiment, the epitope consists of twelve residues of amino acid residues 1-12 OF SEQ ID NO: 133. In an embodiment, the epitope consists of a threonine residue at position 4 of amino acid residues 1-12 OF SEQ ID NO: 133.

[0072] In an embodiment, the epitope is determined by epitope binning. In an embodiment, the epitope is determined by TCE molecule binding to CCR8 peptide-nanobody complexes. In an embodiment, the epitope is determined by screening TCE molecule binding to CCR8 by phage display. In an embodiment, the epitope is determined by determining binding to a CCR8 peptide expressed in human cells, wherein the peptide comprises an amino acid sequence given by SEQ ID NO: 134 or amino acid residues 1-12 of SEQ ID NO: 133. In some embodiments, the epitope is determined by anti-CCR8 TCE molecule binding to the T4R mutation in cynomolgus monkey CCR8. In an embodiment, binding to the T4R mutation is determined in a cell based affinity assay, wherein TCE molecule binding to cells expressing cynomolgus monkey cells CCR8 containing a T4R mutation is compared to TCE molecule binding to cells expressing wild-type cynomolgus monkey CCR8 (comprising a threonine at position four). In some embodiments, an anti-CCR8 TCE molecule binds threonine at position four if it shows reduced binding to CCR8 comprising a T4R mutation. In particular embodiments, an anti-CCR8 TCE molecule binds threonine at position four if it shows no detectable binding to CCR8 comprising a T4R mutation. In some embodiments, wild-type cynomolgus monkey CCR8 comprises an amino acid sequence given by SEQ ID NO: 129. In some embodiments, cynomolgus monkey CCR8 comprising a T4R mutation comprises an amino acid sequence given by SEQ ID NO: 130.

[0073] In some embodiments, the present invention provides a molecule that competes for binding CCR8 with a CCR8 TCE molecule of the present invention. Such molecule that competes for binding may be, for example, a TCE molecule, an antibody, antibody fragment, or polypeptide. In some embodiments, the present invention provides a molecule that binds the same epitope as a CCR8 TCE molecule of the present invention.

[0074] In some embodiments, a TCE molecule of the present invention can be administered concurrently with, before, or after a variety of drugs and treatments widely employed in cancer treatment such as, for example, chemotherapeutic agents, non-chemotherapeutic agents (e.g. anti-PD-1 or anti-PD-L1 inhibitors, such as antagonist antibodies), anti-neoplastic agents, and/or radiation. For example, administration can occur before, during, and/or after any of the treatments described herein. Examples of chemotherapeutic agents are discussed herein and include, but are not limited to, cisplatin, taxol, etoposide, mitoxantrone (Novantrone®), actinomycin D, cycloheximide, camptothecin (or water soluble derivatives thereof), methotrexate, mitomycin (e.g., mitomycin C), dacarbazine (DTIC), anti-neoplastic antibiotics such as adriamycin (doxorubicin) and daunomycin, and all the chemotherapeutic agents mentioned herein.

[0075] In some embodiments, a TCE molecule of the present invention may be administered concurrently with, before, or after a PD-1 antagonist antibody or a PD-L1 antagonist antibody. The term “PD-1 antagonist antibody” refers to an antibody that specifically binds to PD-1 and decreases, blocks, inhibits, abrogates or interferes with signal transduction resulting from the interaction of PD-1 and one or more of its ligands, such as PD-L1 and PD-L2. In some embodiments, a PD-1 antagonist antibody inhibits the binding of PD-1 to PD-L1 and/or PD-L2. The term “PD-L1 antagonist antibody” refers to an antibody that specifically binds to PD-L1 and decreases, blocks, inhibits, abrogates or interferes with signal transduction resulting from the interaction of PD-L1 with the PD-1 receptor. In some embodiments, a PD-L1 antagonist antibody inhibits the binding of PD-L1 to PD-1. In some embodiments, the PD-1 antagonist is any one of Antibody 20C1.006 (SEQ ID NOs: 179-188), Antibody 20C1.009 (SEQ ID NOS: 139-148, or 139-147 and 212), Antibody 20A2.3 (SEQ ID NOs: 149-158), Antibody 20D4.6 (SEQ ID NOs: 159-168), or Antibody 20D4.17 (SEQ ID NOs: 169-178). In one embodiment, the PD-1 antagonist antibody is pembrolizumab. In another embodiment, the PD-1 antagonist antibody is nivolumab. In yet another embodiment, the PD-1 antagonist antibody is cemiplimab. In a particular embodiment, the PD-1 antagonist antibody is antibody 20C1.009, for which the amino acid sequences of the CDRs, variable regions, and full light and heavy chains are provided in SEQ ID NOs: 139-148 and 212. 20C1.009 is also known as AMG 404 and is also known as zeluvalimab. In exemplary aspects, an anti-PD-1 antibody such as 20C1.009 comprises a HC comprising a C-terminal lysine, as in SEQ ID NO: 148. In alternative aspects, the antibody comprises a HC without the C-terminal lysine, as in SEQ ID NO: 212.

[0076] In some embodiments, the 1185-1200

### BRIEF DESCRIPTION OF THE DRAWINGS

[0077] FIG. 1. Depicted are the domains and domain order of TCE molecules of the present invention. Exemplary TCE molecules comprise the following domain order from N-terminus to C-terminus: VH-Linker-VL-Linker-VH-Linker-VL-Linker-Fc1-Linker-Fc2 (left; “CCR8-CD3 TCE”). Other exemplary TCE molecules of the present invention comprise the following domain order from N-terminus to C-terminus: VH-CH1-Linker-VL-Ck/Cλ-Linker-VH-Linker-VL-Linker-Fc1-Linker-Fc2 (right; “scFab TCE”). Abbreviations: scFab=single chain Fab (VH-CH1-Linker-VL-Ck/Cλ); scFv=single chain Fv (VH-Linker-VL); scFc-single chain Fc. Depicted formats may comprise scFab or scFv in either orientation, from N-terminus to C-terminus: VH-VL, VL-VH, VH-CH1—VL-Ck/Cλ, or VL-Ck/Cλ-VH-CHI, including linker. For simplicity, VH-VL and VH-CH1-VL-Ck/Cλ orientations are depicted. Depicted formats may comprise G4S linkers or G4Q linkers. For simplicity, G4S linkers are depicted.

[0078] FIG. 2. Depicted are the domains and domain order of multitargeting BiTE HLE formats of the present invention. Multitargeting BiTE HLE molecules of the scFv-scFv-scFv-scFc format comprises the following domain order from N- to C-terminus: VH-Linker-VL-Linker-VH-Linker-VL-Linker-Fc1-Linker-Fc2, whereas the scFab-scFv-scFv-scFc format comprises VH-CH1-Linker-VL-Cκ/Cλ-Linker-VH-Linker-VL-Linker-VH-Linker-VL-Linker-Fc1-Linker-Fc2. The scFab-scFab-scFv-scFc format comprises VH-CH1-Linker-VL-Cκ/Cλ-Linker-VH-CH1-Linker-VL-Cκ/Cλ-Linker-VH-Linker-VL-Linker-Fc1-Linker-Fc2. Depicted BiTE formats can comprise scFab or scFv in either orientation, HL or LH; for simplicity only HL orientations are depicted. Cκ/Cλ-either Cκ or Cλ. Depicted BiTE formats may comprise G4S linkers or G4Q linkers. For simplicity, G4S linkers are depicted.

### DETAILED DESCRIPTION OF THE INVENTION

[0079] The present disclosure provides single chain TCE molecules comprising an scFab that binds a target antigen and an scFv that binds CD3. The present disclosure also provides TCE molecules comprising an scFv that binds CCR8 and an scFv that binds CD3. Methods of treating cancer are also provided, as well as methods of making said TCE molecules.

[0080] A “single-chain variable fragment” (“scFv”) is a fusion protein in which a VL and a VH region are joined via a linker (e.g., a synthetic sequence of amino acid residues) to form a continuous protein chain wherein the linker is long enough to allow the protein chain to fold back on itself and form a monovalent antigen binding site (see, e.g., Bird et al., Science 242:423-26 (1988) and Huston et al., 1988, Proc. Natl. Acad. Sci. USA 85:5879-83 (1988)). When in the context of other additional moieties (e.g., an Fc region), the scFv can be arranged VH-linker-VL (anti-CD3 scFv), or VL-linker-VH, for example. An anti-target scFv is an scFv that binds an antigen, such as a tumor antigen. An anti-target scFv may bind CCR8. An anti-CD3 scFv binds CD3. Examples of anti-CD3 scFvs include I2E and I2C, given by amino acid sequences 199-206 and 191-198, respectively.

[0081] A “single-chain antigen-binding fragment” (“scFab”) is a fusion protein in which a VH and CHI are joined via a linker to a VL and Cκ or Cλ to form a continuous protein chain wherein the linker is long enough to allow the protein chain to fold back on itself and form a monovalent antigen binding site independent of the orientation. The linker may be, for example, a (G4S)6, (G4S)7, or (G4S)8 linker. A G4S linker is a linker made of amino acids GGGGS (SEQ ID NO: 189), from N-terminus to C-terminus, and may be repeated multiple times. A (G4S)4 linker, for example, means a linker comprising the following amino acids, from N-terminus to C-terminus: GGGGSGGGGSGGGGSGGGGS (SEQ ID NO: 190). Alternatively, the linker may be, for example, a (G4Q)6, (G4Q)7, or (G4Q)8 linker. A G4Q linker is a linker made of amino acids GGGGQ (SEQ ID NO: 207), from N-terminus to C-terminus, and may be repeated multiple times. A (G4Q)4 linker, for example, means a linker comprising the following amino acids, from N-terminus to C-terminus: GGGGQGGGGQGGGGQGGGGQ (SEQ ID NO: 208). The CCR8 TCEs of the present invention comprise G4Q linkers.

[0082] The scFab, scFv, and/or scFc may also have a cysteine clamp. A “cysteine clamp” involves the introduction of a cysteine into a polypeptide domain at a specific location, typically through replacing an existing amino acid at the specific location, so that when in proximity with another polypeptide domain, also having a cysteine introduced at a specific location, a disulfide bond (a “cysteine clamp”) may be formed between the two domains. In certain embodiments, an scFc comprises at least one cysteine clamp that results in a disulfide bond across both CH2 domains. In a further specific embodiment, an scFc comprises at least two cysteine clamps that results in a disulfide bond across both CH2 domains. In other embodiments, a binding construct's VH and VL domains may comprise the cysteine clamp(s) to result in disulfide bond formation between the VH and VL domains. These cysteine clamps will stabilize the VH and VL domains in an antigen-binding configuration.

[0083] A cysteine clamp may be naturally occurring, or it may be a result of a molecule engineered to contain cysteines. For example, a scFab may have a natural cysteine clamp between the heavy and light chain constant domains. An scFab may also have a natural cysteine clamp between the heavy and light chain constant domains and an engineered cysteine clamp between cysteines at residue 44 of the heavy chain variable region and residue 100 of the light chain variable region. In addition, an anti-target scFv may also contain a cysteine clamp between cysteines at residue 44 of the heavy chain variable region and residue 100 of the light chain variable region, whereas an anti-CD3 scFv does not contain an engineered cysteine clamp. An scFc may contain hinge cysteine clamps, natural CH2/CH3 cysteine clamps, and/or an engineered CH2 cysteine clamp (intrachain).

[0084] The VH and VL contain CDRs, which are interspersed with regions that are more conserved, termed framework regions (“FR”). Each variable region is composed of 3 CDRs and 4 FRs, arranged from amino-terminus to carboxy-terminus in the following order: FR1, CDR1, FR2, CDR2, FR3, CDR3, FR4. The 3 CDRs of the VL are referred to as “LCDR1, LCDR2, and LCDR3,” and the 3 CDRs of the VH are referred to as “HCDR1, HCDR2, and HCDR3.” The CDRs contain most of the residues which form specific interactions with the antigen. That is, the CDRs contain most of the residues that are in contact with the antigen's residues. Assignment of amino acids to CDR domains within the VL and HL regions of the TCE molecules of the present invention is based on the well-known Kabat numbering convention (Kabat, et al., Ann. NY Acad. Sci. 190:382-93 (1971); Kabat et al., Sequences of Proteins of Immunological Interest, Fifth Edition, U.S. Department of Health and Human Services, NIH Publication No. 91-3242 (1991)). It is understand that other numbering conventions may also be used, such as Chothia (Chothia et al., “Canonical structures for the hypervariable regions of immunoglobulins”, Journal of Molecular Biology, 196, 901-917 (1987); Al-Lazikani et al., “Standard conformations for the canonical structures of immunoglobulins”, Journal of Molecular Biology, 273, 927-948 (1997)), and/or North (North et al., “A New Clustering of Antibody CDR Loop Conformations”, Journal of Molecular Biology, 406, 228-256 (2011)).

[0085] In the most general sense, a T cell engager (“TCE”) molecule as described herein comprises a single chain polypeptide that can bind to two different antigens. A “TCE molecule” may be used interchangeably with a “BiTE molecule”. A BiTE molecule can comprise an scFv or scFab, as long as it is bispecific, meaning that it binds two targets (target antigen and CD3) at the same time. A TCE molecule is an antigen-binding molecule. A TCE molecule of the present invention may comprise an scFab that binds a target (e.g. tumor or target antigen) and an scFv that binds CD3. Such molecule may have the orientation, from N-terminus to C-terminus: scFab (VH, CH1, linker, VL, either Cκ or Cλ), linker, scFv (VH, linker, VL). Such molecules may alternatively have the orientation, from N-terminus to C-terminus: scFab (VL, either Cκ or Cλ, linker, VH, CH1), linker, scFv (VH, linker, VL). In some embodiments, the scFab binds CCR8. In particular embodiments, the TCE molecule comprises a Cκ.

[0086] A TCE molecule of the present invention may also be comprised of an scFv that binds CCR8 and an scFv that binds CD3. Such TCE molecule may have the following orientation, from N-terminus to C-terminus: scFv that binds CCR8 (VH, linker, VL), linker, scFv that binds CD3 (VH, linker, VL).

[0087] A TCE molecule of the present invention may also have a half-life extending (HLE) moiety. An HLE moiety may extend the in vivo half-life of the TCE molecules of the present invention. Nonlimiting examples of half-life extending moieties include an Fc polypeptide, a single-chain Fc polypeptide (scFc), albumin, an albumin fragment, a moiety that binds to albumin or to the neonatal Fc receptor (FcRn), a derivative of fibronectin that has been engineered to bind albumin or a fragment thereof, a peptide, a single domain protein fragment, or other polypeptide that can increase serum half-life. In other embodiments, a half-life-extending moiety can be a non-polypeptide molecule such as, for example, polyethylene glycol (PEG). In some embodiments, the HLE is a single-chain Fc (“scFc”).

[0088] A scFc is a fusion protein in which a CH2 and CH3 (Fc1) are joined via a linker to another CH2 and CH3 (Fc2) to form a continuous protein chain wherein the linker is long enough to allow the protein chain to fold back on itself. In some embodiments, the scFc comprises cysteine clamps. An scFc may also comprise an Ig-Fc hinge region, or part of an Ig-Fc hinge region. The hinge is amino terminal to the CH2 domain, and the scFc may have the following orientation: (Fc1: hinge, CH2, CH3), linker, (Fc2: hinge, CH2, CH3). It is envisaged that the hinge region promotes dimerization. Such Fc polypeptide molecules can be obtained by papain digestion of an immunoglobulin region (resulting in a dimer of two Fc polypeptide), for example and not limitation. In an embodiment, the polypeptide sequence of an Fc monomer is substantially similar to an Fc polypeptide sequence of: an IgG1 Fc region, an IgG2 Fc region, an IgG3 Fc region, an IgG4 Fc region, an IgM Fc region, an IgA Fc region, an IgD Fc region and an IgE Fc region. (See, e.g., Padlan, Molecular Immunology, 31 (3), 169-217 (1993)).

[0089] A TCE molecule of the present invention having an HLE moiety (e.g. scFc) may have the following orientation: scFab (VH, CH1, linker, VL, Ck), linker, scFv (VH, linker, VL), linker, scFc (hinge, CH2, CH3, linker, hinge, CH2, CH3). A TCE molecule of the present invention having an HLE moiety may also be in the following orientation: scFab (VL, either Cκ or Cλ, linker, VH, CH1), linker, scFv (VH, linker, VL). A TCE molecule of the present invention having an HLE moiety may also be in the following orientation: scFv that binds CCR8 (VH, linker, VL), linker, scFv that binds CD3 (VH, linker, VL), scFc (hinge, CH2, CH3, linker, hinge, CH2, CH3). An scFc may also be referred to as Fc1 (hinge, CH2, CH3), linker, Fc2 (hinge, CH2, CH3, herein.

[0090] FIG. 1 depicts examples of the structures of TCE molecules of the present invention.

[0091] It will be appreciated that a TCE molecule of the present invention may have at least one amino acid substitution, providing that the TCE molecule retains the same or better desired binding specificity (e.g., binding to CCR8 and/or CD3). Therefore, modifications to the TCE molecule structures are encompassed within the scope of the invention. Such modifications may include amino acid substitutions, which may be conservative or non-conservative that do not destroy the desired binding capability of a binding construct. Conservative amino acid substitutions may encompass non-naturally occurring amino acid residues, which are typically incorporated by chemical peptide synthesis rather than by synthesis in biological systems. These include peptidomimetics and other reversed or inverted forms of amino acid moieties. A conservative amino acid substitution may also involve a substitution of a native amino acid residue with a normative residue such that there is little or no effect on the polarity or charge of the amino acid residue at that position.

[0092] A TCE molecule of the present invention may comprise a fragment of an amino acid sequence described herein.

[0093] A TCE molecule of the present invention can bind a target antigen (e.g. antigen expressed on a tumor cell) and CD3 expressed on T cells. A target antigen can be a human protein or a protein from another species, such as mouse, rat, rabbit, and/or cynomolgus monkey. A target antigen may be any protein expressed on tumor cells, in the case for treating cancer. Nonlimiting examples of target antigens include CCR8, claudin-6, and MAGE-B2.

[0094] In another embodiment, the present invention provides vectors comprising a nucleic acid encoding a polypeptide of the invention or a portion thereof. Examples of vectors include, but are not limited to, plasmids, viral vectors, non-episomal mammalian vectors and expression vectors, for example, recombinant expression vectors.

[0095] The recombinant expression vectors of the invention can comprise a nucleic acid of the invention in a form suitable for expression of the nucleic acid in a host cell. The recombinant expression vectors include one or more regulatory sequences, selected on the basis of the host cells to be used for expression, which is operably linked to the nucleic acid sequence to be expressed. Regulatory sequences include those that direct constitutive expression of a nucleotide sequence in many types of host cells (e.g., SV40 early gene enhancer, Rous sarcoma virus promoter and cytomegalovirus promoter), those that direct expression of the nucleotide sequence only in certain host cells (e.g., tissue-specific regulatory sequences, see Voss et al., 1986, Trends Biochem. Sci. 11:287, Maniatis et al., 1987, Science 236:1237, incorporated by reference herein in their entireties), and those that direct inducible expression of a nucleotide sequence in response to particular treatment or condition (e.g., the metallothionin promoter in mammalian cells and the tet-responsive and/or streptomycin responsive promoter in both prokaryotic and eukaryotic systems. It will be appreciated by those skilled in the art that the design of the expression vector can depend on such factors as the choice of the host cell to be transformed, the level of expression of protein desired, etc. The expression vectors of the invention can be introduced into host cells to thereby produce proteins or peptides, including fusion proteins or peptides, encoded by nucleic acids as described herein.

[0096] In another embodiment, the present invention provides host cells into which a recombinant expression vector of the invention has been introduced. A host cell can be any prokaryotic cell or eukaryotic cell. Prokaryotic host cells include gram negative or gram positive organisms, for example E. coli or bacilli. Higher eukaryotic cells include insect cells, yeast cells, and established cell lines of mammalian origin. Examples of suitable mammalian host cell lines include Chinese hamster ovary (CHO) cells or their derivatives such as Veggie CHO and related cell lines which grow in serum-free media (see Rasmussen et al., 1998, Cytotechnology 28:31) or CHO strain DXB-11, which is deficient in DHFR (see Urlaub et al., 1980, Proc. Natl. Acad. Sci. USA 77:4216-20). Additional CHO cell lines include CHO-K1 (ATCC #CCL-61), EM9 (ATCC #CRL-1861), and UV20 (ATCC #CRL-1862). Additional host cells include the COS-7 line of monkey kidney cells (ATCC CRL 1651) (see Gluzman et al., 1981, Cell 23:175), L cells, C127 cells, 3T3 cells (ATCC CCL 163), AM-1/D cells (described in U.S. Pat. No. 6,210,924), HeLa cells, BHK (ATCC CRL 10) cell lines, the CV1/EBNA cell line derived from the African green monkey kidney cell line CV1 (ATCC CCL 70) (see McMahan et al., 1991, EMBO J. 10:2821), human embryonic kidney cells such as 293, 293 EBNA or MSR 293, human epidermal A431 cells, human Colo205 cells, other transformed primate cell lines, normal diploid cells, cell strains derived from in vitro culture of primary tissue, primary explants, HL-60, U937, HaK or Jurkat cells. Appropriate cloning and expression vectors for use with bacterial, fungal, yeast, and mammalian cellular hosts are described by Pouwels et al. (Cloning Vectors: A Laboratory Manual, Elsevier, New York, 1985).

[0097] Typically, expression vectors used in any of the host cells will contain sequences for plasmid maintenance and for cloning and expression of exogenous nucleotide sequences. Such sequences, collectively referred to as “flanking sequences” in certain embodiments will typically include one or more of the following nucleotide sequences: a promoter, one or more enhancer sequences, an origin of replication, a transcriptional termination sequence, a complete intron sequence containing a donor and acceptor splice site, a sequence encoding a leader sequence for polypeptide secretion, a ribosome binding site, a polyadenylation sequence, a polylinker region for inserting the nucleic acid encoding the polypeptide to be expressed, and a selectable marker element. The leader sequence may comprise an amino acid sequence given by SEQ ID NO: 213 (MDMRVPAQLL GLLLLWLRGA RC) which is encoded by SEQ ID NO: 214 (atggacatga gagtgcctgc acagctgctg ggcctgctgc tgctgtggct gagaggegcc agatgc). The leader sequence may comprise an amino acid sequence given by SEQ ID NO: 215 (MAWALLLLTL LTQGTGSWA) which is encoded by SEQ ID NO: 216 (atggcctggg ctctgctgct cctcaccctc ctcactcagg gcacagggtc ctgggcc). The leader polynucleotide sequence may comprise a polynucleotide sequence given by SEQ ID NO: 594 (ATGGACATGAGAGTGCCTGCACAGCTGCTGGGCCTGCTGCTGCTGTGGCTGAGA GGCGCCAGATG)

[0098] Vector DNA can be introduced into prokaryotic or eukaryotic cells via conventional transformation or transfection techniques. For stable transfection of mammalian cells, it is known that, depending upon the expression vector and transfection technique used, only a small fraction of cells may integrate the foreign DNA into their genome. In order to identify and select these integrants, a gene that encodes a selectable marker (e.g., for resistance to antibiotics) is generally introduced into the host cells along with the gene of interest. Additional selectable markers include those which confer resistance to drugs, such as G418, hygromycin and methotrexate. Cells stably transfected with the introduced nucleic acid can be identified by drug selection (e.g., cells that have incorporated the selectable marker gene will survive, while the other cells die), among other methods.

[0099] A polynucleotide encoding an amino acid sequence of a TCE molecule of the present invention can be any length as appropriate for the desired use or function, and can comprise one or more additional sequences, for example, regulatory sequences, and/or be part of a larger nucleic acid, for example, a vector. The skilled artisan will appreciate that, due to the degeneracy of the genetic code, each of the polypeptide sequences disclosed herein is encoded by a large number of other nucleic acid sequences. Mutations can also be introduced into a nucleic acid without significantly altering the biological activity of a polypeptide that it encodes. For example, one can make nucleotide substitutions leading to amino acid substitutions at non-essential amino acid residues.

[0100] Transformed cells can be cultured under conditions that promote expression of the polypeptide, and the polypeptide recovered by conventional protein purification procedures. Polypeptides contemplated for use herein include substantially homogeneous recombinant mammalian polypeptides substantially free of contaminating endogenous materials. Cells containing the nucleic acid encoding the TCE molecules of the present invention also include hybridomas.

[0101] In some embodiments, a vector comprising a nucleic acid molecule as described herein is provided. In some embodiments, the invention comprises a host cell comprising a nucleic acid molecule as described herein. In some embodiments, a nucleic acid molecule encoding a TCE molecule as described herein is provided. In some embodiments, a pharmaceutical composition comprising at least one TCE molecule described herein is provided.

[0102] Glutaminyl and asparaginyl residues are frequently deamidated to the corresponding glutamyl and aspartyl residues, respectively. Alternatively, these residues are deamidated under mildly acidic conditions. Either form of these residues falls within the scope of this invention.

[0103] Other modifications include hydroxylation of proline and lysine, phosphorylation of hydroxyl groups of seryl or threonyl residues, methylation of the α-amino groups of lysine, arginine, and histidine side chains (T. E. Creighton, Proteins: Structure and Molecular Properties, W. H. Freeman & Co., San Francisco, 1983, pp. 79-86), acetylation of the N-terminal amine, and amidation of any C-terminal carboxyl group.

[0104] Another type of covalent modification of the TCE molecules included within the scope of this invention comprises altering the glycosylation pattern of the protein. As is known in the art, glycosylation patterns can depend on both the sequence of the protein (e.g., the presence or absence of particular glycosylation amino acid residues, discussed below), or the host cell or organism in which the protein is produced. Particular expression systems are discussed below.

[0105] Glycosylation of polypeptides is typically either N-linked or O-linked. N-linked refers to the attachment of the carbohydrate moiety to the side chain of an asparagine residue. The tri-peptide sequences asparagine-X-serine and asparagine-X-threonine, where X is any amino acid except proline, are the recognition sequences for enzymatic attachment of the carbohydrate moiety to the asparagine side chain. Thus, the presence of either of these tri-peptide sequences in a polypeptide creates a potential glycosylation site. O-linked glycosylation refers to the attachment of one of the sugars N-acetylgalactosamine, galactose, or xylose, to a hydroxyamino acid, most commonly serine or threonine, although 5-hydroxyproline or 5-hydroxylysine may also be used.

[0106] The TCR-CD3 complex is a heteromultimer comprising a heterodimer comprising TCRα and TCRβ or TCRγ and TCRδ plus various CD3 chains from among the CD3 zeta (CD35) chain, CD3 epsilon (CD3ϵ) chain, CD3 gamma (CD3γ) chain, and CD3 delta (CD3δ) chain.

[0107] The CD3 receptor complex is a protein complex and is composed of four chains. In mammals, the complex contains a CD3γ (gamma) chain, a CD38 (delta) chain, and two CD3ε (epsilon) chains. These chains associate with the T cell receptor (TCR) and the so-called ((zeta) chain to form the T cell receptor CD3 complex and to generate an activation signal in T lymphocytes. The CD3γ (gamma), CD3δ (delta), and CD3ε (epsilon) chains are highly related cell-surface proteins of the immunoglobulin superfamily containing a single extracellular immunoglobulin domain. The intracellular tails of the CD3 molecules contain a single conserved motif known as an immunoreceptor tyrosine-based activation motif or ITAM for short, which is essential for the signaling capacity of the TCR. The CD3 epsilon molecule is a polypeptide which in humans is encoded by the CD3E gene which resides on chromosome 11. The most preferred epitope of CD3 epsilon is comprised within amino acid residues 1-27 of the human CD3 epsilon extracellular domain. It is envisaged that the TCE molecules according to the present invention typically and advantageously show less unspecific T cell activation, which is not desired in specific immunotherapy. This translates to a reduced risk of side effects.

[0108] In some embodiments the effector cell protein can be the human CD3 epsilon (CD3ϵ) chain, which can be part of a multimeric protein. Alternatively, the effector cell protein can be human and/or cynomolgus monkey TCRα, TCRβ, TCRδ, TCRγ, CD3 beta (CD3B) chain, CD3 gamma (CD3γ) chain, CD3 delta (CD38) chain, or CD3 zeta (CD35) chain.

[0109] Moreover, in some embodiments, a TCE molecule can also bind to a CD3ϵ chain from a non-human species, such as mouse, rat, rabbit, new world monkey, and/or old world monkey species. Such species include, without limitation, the following mammalian species: Mus musculus; Rattus; Rattus norvegicus; the cynomolgus monkey, Macaca fascicularis; the hamadryas baboon, Papio hamadryas; the Guinea baboon, Papio; the olive baboon, Papio anubis; the yellow baboon, Papio cynocephalus; the Chacma baboon, Papio ursinus; Callithrix jacchus; Saguinus oedipus; and Saimiri sciureus. Having a therapeutic molecule that has comparable activity in humans and species commonly used for preclinical testing, such as mice and monkeys, can simplify, accelerate, and ultimately provide improved outcomes in drug development. In the long and expensive process of bringing a drug to market, such advantages can be critical.

[0110] As used interchangeably herein, “treatment” and/or “treating” and/or “treat” are intended to refer to all processes wherein there may be a slowing, interrupting, arresting, controlling, stopping, or reversing of the progression of the disorders described herein, but does not necessarily indicate a total elimination of all disorder symptoms. Treatment includes administration of a TCE molecule of the present invention for treatment of a disease or condition in a human that would benefit from activity of a TCE molecule of the present invention and includes: (a) inhibiting further progression of the disease; and (b) relieving the disease, i.e., causing regression of the disease or disorder or alleviating symptoms or complications thereof.

[0111] Suitable PD-L1 antagonist antibodies for use in combination with a TCE molecule of the present invention include, but are not limited to, atezolizumab, avelumab, or durvalumab. Examples of PD-1 antagonist antibodies suitable for use in the methods of the invention include, but are not limited to pembrolizumab, nivolumab, cemiplimab, pidilizumab, spartalizumab, camrelizumab, sintilimab, tislelizumab, toripalimab, dostarlimab, Antibody 20C1.006 (SEQ ID NOs: 72-81), Antibody 20C1.009 (SEQ ID NOs: 32-41 or SEQ ID NOs: 32-40 and SEQ ID NO: 212), Antibody 20A2.003 (SEQ ID NOs: 42-51), Antibody 20D4.006 (SEQ ID NOs: 52-61), or Antibody 20D4.17 (SEQ ID NOs: 62-71), and any of the PD-1 antagonist antibodies described in WO 2019/140196.

[0112] Therapeutically effective doses of a TCE molecule can be administered. The amount of TCE molecule that constitutes a therapeutically dose may vary with the indication treated, the weight of the patient, the calculated skin surface area of the patient. Dosing of a TCE molecule can be adjusted to achieve the desired effects. In many cases, repeated dosing may be required. Dosages and the frequency of administration may vary according to such factors as the route of administration, the particular TCE molecule employed, the nature and severity of the disease to be treated, whether the condition is acute or chronic, and the size and general condition of the subject.

[0113] As used herein, an “effective amount” means the amount of a TCE molecule of the present invention or pharmaceutical composition comprising such TCE molecule that will elicit the biological or medical response of or desired therapeutic effect on a tissue, system, animal, mammal, or human that is being sought by the researcher, medical doctor, or other clinician. An effective amount of the TCE molecule may vary according to factors such as the disease state, age, sex, and weight of the individual, and the ability of the TCE molecule to elicit a desired response in the individual. An effective amount is also one in which any toxic or detrimental effect of the TCE molecule is outweighed by the therapeutically beneficial effects. Such benefit includes improving signs or symptoms of cancer. An effective amount can be readily determined by one skilled in the art, by the use of known techniques, and by observing results obtained under analogous circumstances. An effective amount of a TCE molecule of the present invention may be administered in a single dose or in multiple doses. In determining the effective amount for a patient, a number of factors are considered by the attending medical practitioner, including, but not limited to: the patient's size (e.g., weight or mass), body surface area, age, and general health; the specific disease or disorder involved; the degree of, or involvement, or the severity of the disease or disorder; the response of the individual patient; the particular compound administered; the mode of administration; the bioavailability characteristics of the preparation administered; the dose regimen selected; the use of concomitant medication; and other relevant circumstances known to medical practitioners.

[0114] A TCE molecule, or a pharmaceutical composition containing such a molecule, can be administered by any feasible method. Protein therapeutics will ordinarily be administered by a parenteral route, for example by injection, since oral administration, in the absence of some special formulation or circumstance, would lead to hydrolysis of the protein in the acid environment of the stomach. Subcutaneous, intramuscular, intravenous, intraarterial, intralesional, or peritoneal bolus injection are possible routes of administration. A TCE molecule can also be administered via infusion, for example intravenous or subcutaneous infusion.

[0115] TCE molecules can be administered in the form of a composition comprising one or more additional components such as a physiologically acceptable carrier, excipient or diluent. Optionally, the composition additionally comprises one or more physiologically active agents. In various particular embodiments, the composition comprises one, two, three, four, five, or six physiologically active agents in addition to one or more TCE molecules.

### EXAMPLES

### Example: TCE Molecule Affinities

### Claudin-6 TCE Molecule Affinities

[0116] Claudin-6 T cell engager (“TCE”) molecules are examined for affinities to human Claudin-6. TCE molecules are represented below in Table 1 by unique identifiers. For example, the TCE molecule “CL6 3C1 HL CC×12C×scFc” refers to a TCE molecule having, from N-terminus to C-terminus, an scFv with an engineered cysteine clamp (“CC”; clamp between VH44 and VL 100 (Kabat numbering)) that binds Claudin-6 (“CL6”) and has the VH N-terminal to the VL, an I2C scFv that targets CD3 (VH N-terminal to the VL), and an scFc. The TCE molecule “CL6 3C1 HL scFab×I2C×scFc” refers to a TCE molecule having an scFab that binds Claudin-6 having the VH N-terminal to the VL, an I2C scFv that targets CD3 (VH N-terminal to the VL), and an scFc. An “x” represents a linker. The CDR sequences for both CL6 3C1 molecules are identical. FIG. 1 depicts a generic structure for each molecule. The human Claudin 6 sequence is given by UniProt entry P56747 and includes variants and isoforms thereof.

[0117] Cell-based affinity of TCE molecules is determined by nonlinear regression (one site-specific binding) analysis. CHO cells transfected with human Claudin-6 were incubated with decreasing concentrations of TCE molecules (up to 50 nM, step 1:1, 10 steps) for 16 h at 4° C. Bound TCE molecules are detected with Alexa Fluor 488-conjugated AffiniPure Fab Fragment Goat Anti-Human IgG (H+L). Fixed cells are detected with FACS flow and signals are detected by fluorescence cytometry. Respective equilibrium dissociation constant (Kd) values are calculated with the one site specific binding evaluation tool of the GraphPad Prism software. Mean Kd values and standard deviation are calculated with Microsoft Excel. Mean Kd values are calculated from three independent experiments.

[0118] According to procedures essentially as described above, the following affinities were obtained.

TABLE 1
Cell-based affinities of Claudin-6
TCE molecules to human Claudin-6.

| | Mean |
|---|---|
| TCE molecule | Kd [nM] |
| CL6 3C1 HL CC scFv × I2C × scFc | 7.77 ± 1.49 |
| CL6 3C1 HL scFab × I2C × scFc | 2.48 ± 0.24 |
| CL6 3C1-01 HL (scFv) CC × I2C × | 2.09 ± 0.76 |
| scFc | |
| CL6 3C1-01 HL scFab × I2C × scFc | 1.19 ± 0.09 |
| CL6 3C1-03 HL CC scFv × I2C × scFc | 7.42 ± 2.11 |
| CL6 3C1-03 HL scFab × I2C × scFc | 4.56 ± 1.42 |
| CL6 3C1-04 HL CC(scFv) × I2C × scFc | 24.82 ± 10.3 |
| CL6 3C1-04 HL scFab × I2C × scFc | 5.73 ± 2.38 |
| CL6 3C1-04.1 HL CC scFv × I2C × | 12.94 ± 4.23 |
| scFc | |
| CL6 3C1-04.1 HL scFab × I2C × scFc | 3.55 ± 0.91 |
| CL6 3C1-05 HL CC scFv × I2C × scFc | 24.39 ± 11.42 |
| CL6 3C1-05 HL scFab × I2C × scFc | 3.03 ± 0.73 |
| CL6 3C1-05.1 HL CC scFv × I2C × | 2.70 ± 0.66 |
| scFc | |
| CL6 3C1-05.1 HL scFab × I2C × scFc | 1.12 ± 0.49 |
| CL6 3C1-06 HL CC scFv × I2C × scFc | 17.61 ± 7.46 |
| CL6 3C1-06 HL scFab × I2C × scFc | 4.84 ± 2.17 |
| CL6 3D4-01.1 LH CC scFv × I2C × | 5.83 ± 1.36 |
| scFc | |
| CL6 3D4-01.1 LH scFab × I2C × scFc | 2.51 ± 1.05 |
| CL6 3D4-02 LH CC scFv × I2C × scFc | 4.23 ± 1.02 |
| CL6 3D4-02 LH scFab × I2C × scFc | 1.41 ± 0.42 |
| CL6 3D4-03.1 LH CC scFv × I2C × | 11.83 ± 3.14 |
| scFc | |
| CL6 3D4-03.1 LH scFab × I2C × scFc | 2.23 ± 0.96 |
| CL6 3D4-04 LH CC scFv × I2C × scFc | 17.00 ± 8.23 |
| CL6 3D4-04 LH scFab × I2C × scFc | 6.99 ± 2.04 |
| CL6 3D4-04.G2 LH CC scFv × I2C × | 11.42 ± 3.08 |
| scFc | |
| CL6 3D4-04.G2 LH scFab × I2C × scFc | 27.04 ± 2.52 |
| CL6 3C1-02 HL CC scFv × I2C × scFc | 5.45 ± 0.81 |
| CL6 3C1-02 HL scFab × I2C × scFc | 2.62 ± 0.30 |

[0119] As shown in Table 1, these data demonstrate that TCE molecules having an scFab target binder show higher affinity for human Claudin-6 compared to TCE molecules having an scFv target binder.

### Mage-B2 TCE Molecule Affinities

[0120] Similarly, cell-based affinity of MAGE-B2 TCE molecules is determined by nonlinear regression (one site-specific binding) analysis. HLA-A*02:01 expressing T2 cells exogenously loaded with human MAGE-B2 peptide are incubated with decreasing concentrations of TCE molecules (up to 400 nM, 1:2 dilutions, 11 steps) for 16 hours at 4° C. Bound TCE molecules are detected with Alexa Fluor 488-conjugated AffiniPure Fab Fragment Goat Anti-Human IgG (H+L). Fixed cells are stained with DRAQ5, Far-Red Fluorescent Live-Cell Permeant DNA Dye, and signals are detected by fluorescence cytometry. Respective equilibrium dissociation constant (Kd) values are calculated with the one site specific binding evaluation tool of the GraphPad Prism software. Mean Kd values and standard deviations are calculated with Microsoft Excel. Mean Kd values are calculated from three independent experiments.

[0121] Following procedures essentially as described above, the following data were obtained.

TABLE 2
Cell-based affinities of MAGE-B2 TCE molecules.

| Construct | Mean Kd [nM] |
|---|---|
| MA 03-D8 AS CC scFv × I2C × scFc | 0.54 ± 0.10 |
| MA 03-D8 AS scFab × I2C × scFc | 0.42 ± 0.11 |
| MA 09-E2 CC scFv × I2C × scFc | 0.70 ± 0.19 |
| MA 09-E2 scFab × I2C × scFc | 0.39 ± 0.03 |
| MA 09-F12 CC scFv × I2C × scFc | 0.53 ± 0.18 |
| MA 09-F12 scFab × I2C × scFc | 0.46 ± 0.13 |
| MA 09-G10 CC scFv × I2C × scFc | 0.83 ± 0.30 |
| MA 09-G10 scFab × I2C × scFc | 0.52 ± 0.10 |
| MA 09-H10 CC scFv × I2C × scFc | 0.62 ± 0.13 |
| MA 09-H10 scFab × I2C × scFc | 0.49 ± 0.18 |
| MA 09-H7 CC scFv × I2C × scFc | 0.79 ± 0.37 |
| MA 09-H7 scFab × I2C × scFc | 0.50 ± 0.11 |
| MA 10-D3 CC scFv × I2C × scFc | 1.10 ± 0.23 |
| MA 10-D3 scFab × I2C × scFc | 0.54 ± 0.10 |
| MA 10-D6 CC scFv × I2C × scFc | 0.67 ± 0.12 |
| MA 10-D6 scFab × I2C × scFc | 0.50 ± 0.10 |
| MA 10-G10 AS CC scFv × I2C × scFc | 1.75 ± 0.52 |
| MA 10-G10 AS scFab × I2C × scFc | 0.65 ± 0.10 |
| MA 98-C7 CC scFv × I2C × scFc | 0.72 ± 0.22 |
| MA 98-C7 scFab × I2C × scFc | 0.45 ± 0.08 |
| MA 03-E11 AS CC scFv × I2C × scFc | 4.21 ± 0.46 |
| MA 03-E11 AS scFab × I2C × scFc | 1.25 ± 0.15 |
| MA 86-A4-N-F5 CC scFv × I2C × scFc | 51.80 ± 12.18 |
| MA 86-A4-N-F5 scFab × I2C × scFc | 65.87 ± 15.79 |
| MA 88-B3-F9 CC scFv × I2C × scFc | 74.06 ± 36.22 |
| MA 88-B3-F9 scFab × I2C × scFc | 83.67 ± 8.70 |
| MA SG-F28 CC scFv × I2C × scFc | 76.77 ± 18.34 |
| MA SG-F28 scFab × I2C × scFc | 62.81 ± 8.08 |

[0122] As shown in Table 2, these data demonstrate that TCE molecules having an scFab target binder show higher affinity for human MAGE-B2 compared to TCE molecules having an scFv target binder.

### Example: FACS-Based Cytotoxicity Assay with Unstimulated Human PBMC

[0123] Human peripheral blood mononuclear cells (PBMC) are prepared by Ficoll density gradient centrifugation from enriched lymphocyte preparations (buffy coats), a side product of blood banks collecting blood for transfusions. Buffy coats are supplied by a local blood bank and PBMC are prepared on the day after blood collection. After Ficoll density centrifugation and extensive washes with Dulbecco's PBS (Gibco), remaining erythrocytes are removed from PBMC via incubation with erythrocyte lysis buffer (155 mM NH4Cl, 10 mM KHCO3, 100 μM EDTA). Remaining lymphocytes mainly encompass B and T lymphocytes, NK cells, and monocytes. PBMC are kept in culture at 37° C./5% CO2 in RPMI medium (Gibco) with 10% FCS (Gibco).

[0124] Human T cells are isolated from PBMC using human Pan T cell isolation kit (Miltenyi Biotec, #130-096-535) according to the manufacturer's protocol. T cells are isolated using LS Columns (Milteny Biotec, #130-042-401). T cells are cultured in RPMI complete medium (RPMI1640; Biochrom AG, #FG1215) supplemented with 10% FBS (Bio West, #S1810), 1× non-essential amino acids (Biochrom AG, #K0293), 10 mM Hepes buffer (Biochrom AG, #L1613), 1 mM sodium pyruvate (Biochrom AG, #L0473) and 100 U/mL penicillin/streptomycin (Biochrom AG, #A2213) at 37° C.

[0125] For the analysis of cell lysis in flow cytometry assays, the fluorescent membrane dye DiOC18 (DiO) (Thermo Fisher, #V22886) is used to label target antigen positive cells (Claudin-6 stable transfected CHO cells or DAN-G stable transfected MAGE-B2 cells) as target cells and distinguish them from effector cells. Briefly, cells are harvested, washed once with PBS and adjusted to 10^{e}6 cells/mL in PBS containing 2% (v/v) FBS and the membrane dye DiO (5 μL/10^{e}6 cells). After incubation for 3 minutes at 37° C., cells are washed twice in complete RPMI medium and the cell number is adjusted to 1.25×10^{e}5 cells/mL. The vitality of cells is determined using Nucleocounter NC-250 (Chemometec) and Solution18 Dye containing Acridine Orange and DAPI (Chemometec).

[0126] To quantify the lysis of target antigen positive cell lines in the presence of serial dilutions of TCE molecules, equal volumes of DiO-labeled target cells and effector cells (i.e., PBMC w/o CD14+ cells) are mixed, resulting in an E:T cell ratio of 10:1. 160 μl of this suspension is transferred to each well of a 96-well plate. Forty μL of serial dilutions of the corresponding TCE molecule, a negative control, or RPMI complete medium as an additional negative control are added. The TCE molecule-mediated cytotoxic reaction proceeds for 48 hours in a 7% CO2 humidified incubator. Cells are transferred to a new 96-well plate and loss of target cell membrane integrity is monitored by adding propidium iodide (PI) at a final concentration of 1 μg/mL. PI is a membrane impermeable dye that normally is excluded from viable cells, whereas dead cells take it up and become identifiable by fluorescent emission.

[0127] Samples are measured by flow cytometry on an iQue Plus (Intellicyt, now Sartorius) instrument and analyzed by Forecyt software (Intellicyt). Target cells are identified as DiO-positive cells. PI-negative target cells are classified as living target cells. Percentage of cytotoxicity is calculated as dead target cells/target cells×100. Using GraphPad Prism 7.04 software (Graph Pad Software, San Diego), the percentage of cytotoxicity is plotted against the corresponding TCE molecule concentrations. Dose response curves are analyzed with the four parametric logistic regression models for evaluation of sigmoid dose response curves with fixed hill slope and EC₅₀ values are calculated.

[0128] Following procedures essentially as described above, the following data were obtained.

TABLE 3
Claudin-6 TCE molecule mediated cytotoxicity.

| | EC₅₀ |
|---|---|
| TCE Molecule | [pM] |
| CL6 3C1 HL CC scFv × I2C × scFc | 2.35 |
| CL6 3C1 HL scFab × I2C × scFc | 0.13 |
| CL6 3C1-01 HL CC scFv × I2C × scFc | 1.86 |
| CL6 3C1-01 HL scFab × I2C × scFc | 0.11 |
| CL6 3C1-03 HL CC scFv × I2C × scFc | 12.80 |
| CL6 3C1-03 HL scFab × I2C × scFc | 0.45 |
| CL6 3C1-04 HL CC scFv × I2C × scFc | 33.7 |
| CL6 3C1-04 HL scFab × I2C × scFc | 0.67 |
| CL6 3C1-04.1 HL CC scFv × I2C × | 15.43 |
| scFc | |
| CL6 3C1-04.1 HL scFab × I2C × scFc | 0.38 |
| CL6 3C1-05 HL CC scFv × I2C × scFc | 18.75 |
| CL6 3C1-05 HL scFab × I2C × scFc | 0.42 |
| CL6 3C1-05.1 HL CC scFv × I2C × | 5.27 |
| scFc | |
| CL6 3C1-05.1 HL scFab × I2C × scFc | 0.11 |
| CL6 3C1-06 HL CC scFv × I2C × scFc | 36.7 |
| CL6 3C1-06 HL scFab × I2C × scFc | 0.58 |
| CL6 3D4-01.1 LH CC scFv × I2C × | 25.9 |
| scFc | |
| CL6 3D4-01.1 LH scFab × I2C × scFc | 1.41 |
| CL6 3D4-02 LH CC scFv × I2C × scFc | 4.69 |
| CL6 3D4-02 LH scFab × I2C × scFc | 0.52 |
| CL6 3D4-03.1 LH CC scFv × I2C × | 23.3 |
| scFc | |
| CL6 3D4-03.1 LH scFab × I2C × scFc | 1.03 |
| CL6 3D4-04 LH CC scFv × I2C × scFc | 37.2 |
| CL6 3D4-04 LH scFab × I2C × scFc | 3.15 |
| CL6 3D4-04.G2 LH CC scFv × I2C × | 48.5 |
| scFc | |
| CL6 3D4-04.G2 LH scFab × I2C × scFc | 11.99 |

[0129] These data demonstrate that the Claudin-6 TCE molecules having an scFab target binder demonstrated improved potency of Claudin-6 transfected CHO cells compared to TCE molecules having an scFv target binder.

[0130] Data demonstrating MAGE-B2 TCE molecule cytotoxicity is shown in Table 4.

TABLE 4
MAGE-B2 TCE molecule mediated cytotoxicity.

| | EC₅₀ |
|---|---|
| TCE Molecule | [pM] |
| MA 03-D8 AS scFab × I2C × scFc | 4.8 |
| MA 03-D8 AS CC scFv × I2C × scFc | 15.2 |
| MA 09-E2 scFab × I2C × scFc | 21.7 |
| MA 09-E2 CC scFv × I2C × scFc | 68.7 |
| MA 09-F12 scFab × I2C × scFc | 48.8 |
| MA 09-F12 CC scFv × I2C × scFc | 83.5 |
| MA 09-G10 scFab × I2C × scFc | 52.8 |
| MA 09-G10 CC scFv × I2C × scFc | 90.8 |
| MA 09-H10 scFab × I2C × scFc | 40.5 |
| MA 09-H10 CC scFv × I2C × scFc | 103.4 |
| MA 09-H7 scFab × I2C × scFc | 74.6 |
| MA 09-H7 CC scFv × I2C × scFc | 227.2 |
| MA 10-B5 scFab × I2C × scFc | 11.7 |
| MA 10-B5 CC scFv × I2C × scFc | 33.3 |
| MA 10-D3 scFab × I2C × scFc | 60.8 |
| MA 10-D3 CC scFv × I2C × scFc | 196.9 |
| MA 10-D6 scFab × I2C × scFc | 27.7 |
| MA 10-D6 CC scFv × I2C × scFc | 45.0 |
| MA 10-G10 AS scFab × I2C × scFc | 32.9 |
| MA 10-G10 AS CC scFv × I2C × scFc | 141.0 |
| MA 98-C7 scFab × I2C × scFc | 9.9 |
| MA 98-C7 CC scFv × I2C × scFc | 70.5 |
| MA 03-E11 AS scFab × I2C × scFc | 60.6 |
| MA 03-E11 AS CC scFv × I2C × scFc | 212.4 |

[0131] These data demonstrate that the MAGE-B2 TCE molecules having an scFab target binder demonstrated increased lysis of DAN-G cells compared to TCE molecules having an scFv target binder.

[0132] In a similar experiment, a scFab-containing TCE molecule having a disulfide-bridge (cysteine clamp (“CC”); cysteines at Kabat residues VH44/VL100; CL6 3C1-02scFabCC×I2C×scFc) is tested for cytotoxic activity. These data (shown in Table 5) demonstrate that the scFab-containing TCE molecule having a disulfide bridge showed similar activity compared to the scFab-containing TCE molecule without this disulfide bridge. Both scFab-containing TCE molecules demonstrated increased cytotoxicity compared to TCE molecules having an scFv target binder.

TABLE 5
CL 3C1-02-based BiTE molecules.

| | EC50 |
|---|---|
| CLDN6 BiTE molecules | [pM] |
| CL6 3C1-02 CC scFv × I2C × | 89 |
| scFc | |
| CL6 3C1-02 scFab × I2C × scFc | 4.2 |
| CL6 3C1-02 scFab CC × I2C × | 4.3 |
| scFc | |

[0133] Data from TCE molecules binding a target antigen and CD3 is shown below in Table 6. The TCE molecules either contained a (G4S)8 linker in a scFab (VH-CHI-(G4S)8 linker-VL-Ck)-linker-aCd3scFv (VH-linker-VL)-linker-scFc (Fc-linker-Fc) orientation (top row), a (G4S)6 linker (second row), a disulfide-bridge stabilized (Kabat VH44/VL100) scFv target binding moiety (third row), or a (G4S)8 linker in a scFab (VH-CHI-linker-VL-Ck)-linker-aCd3scFv (VH-linker-VL)-linker-scFc (Fc-linker-Fc) orientation (bottom row).

TABLE 6
TCE molecule mediated cytotoxicity.

| | EC50 |
|---|---|
| TCE Molecule | [pM] |
| HL scFab(G4S)8 × I2C × scFc | 3.9 |
| HL scFab(G4S)6 × I2C × scFc | 7.5 |
| HL CC scFv × I2C × scFc | 40 |
| LH scFab(G4S)8 × I2C × scFc | 60 |

[0134] These data demonstrate that the scFab-containing TCE molecule having an scFab (G4S)8 linker showed the highest cytotoxic activity compared to the other molecules tested. The scFab-containing TCE molecule with the VL-Ck-linker-VH-CH1-aCD3-scFc orientation demonstrated the least activity, which could be due to the orientation difference as compared to scFab-containing TCE molecule having the orientation VH-CH1-VL-Ck-aCD3-scFc.

### Example: Application of scFab Moiety in TCE Formats

[0135] Multitargeting TCE molecules are tested for cytotoxicity. As shown in the structures in FIG. 2, tested TCE molecules have either two anti-target scFvs (CD22 11-C3 CC scFv×CD20 29-F5 CC scFv×12C×scFc and CD20 99-E5 CC scFv×CD22 28-B7N655 CC scFv×I2C×scFc), an anti-target scFab and an anti-target scFv (CD20 99-E5 scFab×CD22 28-B7N655 CC scFv×I2C×scFc), or two anti-target scFabs (CD22 11-C3 scFab×CD20 29-F5 scFab×I2C×scFc). Tested TCE molecules have an anti-CD3 scFv (“I2C”) and an scFc. 11-C3, 29-F5, 99-E5, and 28-B7N655 refer to target binders, such that 11-C3 scFab will have the same CDRs as 11-C3 scFv, for example. Cytotoxicity of Raji cells (double positive for CD20 and CD22) is essentially determined as described above, and the following data were obtained.

TABLE 7
TCE molecule mediated cytotoxicity (EC50).

| | | CHO | CHO |
|---|---|---|---|
| TCE molecule | Raji | CD20 | CD22 |
| CD22 11-C3 scFab × CD20 | 872 | 14.5 | 17.0 |
| 29-F5 scFab × I2C × scFc | | | |
| CD22 11-C3 CC scFv × CD20 | 2308 | 64.7 | 16.4 |
| 29-F5 CC scFv × I2C × scFc | | | |
| CD20 99-E5 scFab × CD22 | 28.8 | 20.9 | |
| 28-B7N655 CC scFv × I2C × scFc | | | |
| CD20 99-E5 CC scFv × CD22 | 35.4 | 52.4 | |
| 28-B7N655 CC scFv × I2C × scFc | | | |

[0136] As shown in Table 7, TCE molecules having scFabs as both target binders (first row) have improved potency against single positive target cells (CD20 transfected CHO) and on double-positive Raji cells compared to TCE molecules having scFvs as both target binders (second row). In addition, TCE molecules having a CD20-binding scFab (third row) demonstrate improved potency for CD20 transfected CHO cells and double-positive Raji cells compared to TCE molecules having a CD20-binding scFv (fourth row).

### Example: Evaluation of TCE Molecules Protein Surface Hydrophobicity

[0137] To measure protein surface hydrophobicity, isolated and formulated TCE molecule monomer adjusted to a defined protein concentration is transferred into autosampler fitting sample vials and measured on a FPLC system. A Hydrophobic Interaction Chromatography (HIC) column is equilibrated with formulation buffer and a defined volume of protein solution applied at a constant formulation buffer flow. Detection is done by OD280 nm optical absorption.

[0138] Elution behavior is determined by peak shape respectively mathematically calculation of declining signal peak slope. Steeper slope/higher slope values indicate less hydrophobic interaction of the protein surface compared to constructs with more flat elution behavior and lower slope value.

[0139] Following procedures essentially as described above, the following data were obtained. “I2C” refers to an scFv that binds CD3. “CC” refers to an scFv containing an engineered cysteine clamp between a cysteine at position 44 (VH) and a cysteine at position 100 (VL) (Kabat).

TABLE 8
HIC elution behavior of MAGE-B2 TCE molecules.

| | HIC Elution |
|---|---|
| TCE molecule | Slope |
| MA 03-D8 AS CC scFv × I2C × scFc | 49.69 |
| MA 03-D8 AS scFab × I2C × scFc | 50.4 |
| MA 03-E11 AS CC scFv × I2C × scFc | 25.35 |
| MA 03-E11 AS scFab × I2C × scFc | 45.93 |
| MA 09-E2 CC scFv × I2C × scFc | 21.55 |
| MA 09-E2 scFab × I2C × scFc | 39.58 |
| MA 09-F12 CC scFv × I2C × scFc | 25.39 |
| MA 09-F12 scFab × I2C × scFc | 35.03 |
| MA 09-G10 CC scFv × I2C × scFc | 37.3 |
| MA 09-G10 scFab × I2C × scFc | 40.26 |
| MA 09-H10 CC scFv × I2C × scFc | 29.02 |
| MA 09-H10 scFab × I2C × scFc | 40.21 |
| MA 09-H7 CC scFv × I2C × scFc | 35.56 |
| MA 09-H7 scFab × I2C × scFc | 43.47 |
| MA 10-D3 CC scFv × I2C × scFc | 16.23 |
| MA 10-D3 scFab × I2C × scFc | 35.17 |
| MA 10-D6 CC scFv × I2C × scFc | 7.4 |
| MA 10-D6 scFab × I2C × scFc | 27.65 |
| MA 10-G10 AS CC scFv × I2C × scFc | 51.54 |
| MA 10-G10 AS scFab × I2C × scFc | 43.73 |
| MA 86-A4-N-F5 CC scFv × I2C × scFc | 35.66 |
| MA 86-A4-N-F5 scFab × I2C × scFc | 60.06 |
| MA 88-B3-F9 CC scFv × I2C × scFc | 51.05 |
| MA 88-B3-F9 scFab × I2C × scFc | 54.89 |
| MA 98-C7 CC scFv × I2C × scFc | 44.38 |
| MA 98-C7 scFab × I2C × scFc | 52.04 |
| MA SG-F28 CC scFv × I2C × scFc | 19.77 |
| MA SG-F28 scFab × I2C × scFc | 30.47 |
| MA 10-B5 CC scFv × I2C × scFc | 16.81 |
| MA 10-B5 scFab × I2C × scFc | 42.19 |

TABLE 9
HIC elution behavior of CD20/CD22 TCE molecules.

| | HIC Elution |
|---|---|
| TCE Molecule | Slope |
| CD22 11-C3 scFab × CD20 29-F5 | 46.27 |
| scFab × I2C × scFc | |
| CD22 11-C3 CC scFv × CD20_29-F5_CC | 17.49 |
| scFv × I2C ×scFc | |
| CD20 99-E5scFab × CD22 28-B7 N655 | 17.4 |
| CC scFv × I2C × scFc | |
| CD20 99-E5 CC scFv × CD22 28-B7 N655 | 10.99 |
| CC scFv × I2C × scFc | |

TABLE 10
HIC elution behavior of Claudin-6 TCE molecules.

| | HIC Elution |
|---|---|
| TCE Molecule | Slope |
| CL6 3C1 HL CC scFv × I2C × scFc | 48.1 |
| CL6 3C1 HL scFab × I2C × scFc | 51.85 |
| CL6 3C1-01 HL CC scFv × I2C × scFc | 41.54 |
| CL6 3C1-01 HL scFab × I2C × scFc | 44.32 |
| CL6 3C1-03 HL CC scFv × I2C × scFc | 52.18 |
| CL6 3C1-03 HL scFab × I2C × scFc | 46.19 |
| CL6 3C1-04 HL CC scFv × I2C × scFc | 44.08 |
| CL6 3C1-04 HL scFab × I2C × scFc | 51.49 |
| CL6 3C1-04.1 HL CC scFv × I2C × scFc | 36.65 |
| CL6 3C1-04.1 HL scFab × I2C × scFc | 35.92 |
| CL6 3C1-05 HL CC scFv × I2C × scFc | 37.31 |
| CL6 3C1-05 HL scFab × I2C × scFc | 45.42 |
| CL6 3C1-05.1 HL CC scFv × I2C × scFc | 33.43 |
| CL6 3C1-05.1 HL scFab × I2C × scFc | 36.13 |
| CL6 3C1-06 HL CC scFv × I2C × scFc | 42.98 |
| CL6 3C1-06 HL scFab × I2C × scFc | 44.7 |
| CL6 3D4-01.1 LH CC scFv × I2C × scFc | 16.52 |
| CL6 3D4-01.1 LH scFab × I2C × scFc | 15.83 |
| CL6 3D4-02 LH CC scFv × I2C × scFc | 10.1 |
| CL6 3D4-02 LH scFab × I2C × scFc | 16.36 |
| CL6 3D4-03.1 LH CC scFv × I2C × scFc | 16.01 |
| CL6 3D4-03.1 LH scFab × I2C × scFc | 18.23 |
| CL6 3D4-04 LH CC scFv × I2C × scFc | 13.58 |
| CL6 3D4-04 LH scFab × I2C × scFc | 18.23 |
| CL6 3D4-04.G2 LH CC scFv × I2C × scFc | 15.43 |
| CL6 3D4-04.G2 LH scFab × I2C × scFc | 27.12 |
| CL6 3C1-02 CC scFv × I2C × scFc | 46.25 |
| CL6 3C1-02 scFab × I2C × scFc | 45.79 |

[0140] These data demonstrate the degree of interaction of the applied construct with the hydrophobic column matrix surface. In most cases, peak slopes for the scFab comprising TCE molecules are steeper and have higher mathematically values compared to the other tested TCE molecules. Constructs having a higher surface hydrophobicity will have a stronger interaction with the matrix compared to constructs with less surface hydrophobicity and will therefore elute over a bigger elution volume with less curve steepness.

### Example: Evaluation of TCE Molecules Aggregation Temperature

[0141] Rising temperatures may destabilize protein constructs, which will expose structures originally buried by protein folding. These structures can be sticky and can get in contact with other constructs resulting in aggregation and therefore a larger hydrodynamic radius. Molecules having higher aggregations temperature are more stable compared to molecules having lower aggregation temperatures.

[0142] To determine aggregation temperature of scFab-containing TCE molecules, isolated and formulated TCE molecule monomer adjusted to a defined protein concentration is pipetted in duplicates into a 96-well plate and covered with paraffin oil. The 96-well plate is transferred to a dynamic light scattering DLS reader capable of heating the plate at a defined rate in a defined temperature range. Measurement is performed from 40° C. to 70° C. at a defined rate of temperature increase. Detection is done by dynamic light scattering determining the hydrodynamic radius of the constructs over the temperature ramp. Temperature at the beginning of increase of hydrodynamic radius is defined as aggregation temperature. “I2C” refers to an scFv that binds CD3. “CC” refers to an scFv containing an engineered cysteine clamp (cysteine clamp between a cysteine at position 44 (VH) and a cysteine at position 100 (VL) (Kabat)) that binds a target (i.e. MAGE-B2 in Table 11).

TABLE 11
DLS aggregation temperature of MAGE-B2 (“MA”) TCE molecules.

| | Mean Aggregation |
|---|---|
| TCE molecule | Temperature [° C.] |
| MA 03-D8 AS CC scFv × I2C × scFc | 53.57 |
| MA 03-D8 AS scFab × I2C × scFc | 57.86 |
| MA 03-E11 AS CC scFv × I2C × scFc | 54.51 |
| MA 03-E11 AS scFab× I2C × scFc | 57.96 |
| MA 09-E2 CC scFv × I2C × scFc | 52.09 |
| MA 09-E2 scFab × I2C × scFc | 57.83 |
| MA 09-F12 CC scFv × I2C × scFc | 53.45 |
| MA 09-F12 scFab × I2C × scFc | 58.44 |
| MA 09-G10 CC scFv × I2C × scFc | 49.84 |
| MA 09-G10 scFab × I2C × scFc | 58.56 |
| MA 09-H10 CC scFv × I2C × scFc | 55.14 |
| MA 09-H10 scFab × I2C × scFc | 55.42 |
| MA 09-H7 CC scFv × I2C × scFc | 53.11 |
| MA 09-H7 scFab × I2C × scFc | 58.64 |
| MA 10-D3 CC scFv × I2C × scFc | 52.67 |
| MA 10-D3 scFab × I2C × scFc | 58.01 |
| MA 10-D6 CC scFv × I2C × scFc | 52.19 |
| MA 10-D6 scFab × I2C × scFc | 58.23 |
| MA 10-G10 AS CC scFv × I2C × scFc | 54.11 |
| MA 10-G10 AS scFab × I2C × scFc | 57.79 |
| MA 86-A4-N-F5 CC scFv × I2C × scFc | 52.54 |
| MA 86-A4-N-F5 scFab × I2C × scFc | 58.47 |
| MA 88-B3-F9 CC scFv × I2C × scFc | 56.44 |
| MA 88-B3-F9 scFab × I2C × scFc | 57.7 |
| MA 98-C7 CC × I2C scFv × scFc | 56.96 |
| MA 98-C7 scFab × I2C × scFc | 57.17 |
| MA SG-F28 CC scFv × I2C × scFc | 53.36 |
| MA SG-F28 scFab × I2C × scFc | 58.48 |
| MA 10-B5 CC scFv × I2C × scFc | 52.6 |
| MA 10-B5 scFab × I2C × scFc | 58.22 |

TABLE 12
DLS aggregation temperature of CD20 and CD22
TCE molecules.

| | Mean |
|---|---|
| | Aggregation |
| | Temperature |
| TCE molecule | [° C.] |
| CD22 11-C3 scFab × CD20 29-F5 | 60.40 |
| scFab × I2C × scFc | |
| CD22 11-C3 CC scFv × CD20 29-F5 | 54.66 |
| CC scFv × I2C × scFc | |
| CD20 99-E5 scFab × CD22 28-B7 N655 | 56.24 |
| CC scFv × I2C × scFc | |
| CD20 99-E5 CC scFv CD22 28-B7 N655 | 56.15 |
| CC scFv × I2C × scFc | |

TABLE 13
DLS aggregation temperature of Claudin-6 TCE molecules.

| | | Mean Aggregation |
|---|---|---|
| | | Temperature |
| | TCE molecule (×I2C × scFc) | [° C.] |
| CL6 3C1 | HL CC scFv | 50.50 |
| | HL scFab | 55.98 |
| | 01 HL CC scFv | 54.64 |
| | 01 HL scFab | 56.77 |
| | 03 HL CC scFv | 51.72 |
| | 03 HL scFab | 56.45 |
| | 04 HL CC scFv | 49.84 |
| | 04 HL scFab | 56.48 |
| | 04.1 HL CC scFv | 50.73 |
| | 04.1 HL scFab | 56.37 |
| | 05 HL CC scFv | 49.33 |
| | 05 HL scFab | 56.29 |
| | 05.1 HL CC scFv | 51.77 |
| | 05.1 HL scFab | 55.94 |
| | 06 HL CC scFv | 50.03 |
| | 06 HL scFab | 55.94 |
| CL6 3D4 | 01.1 LH CC scFv | 51.61 |
| | 01.1 LH scFab | 56.62 |
| | 02 LH CC scFv | 52.76 |
| | 02 LH scFab | 55.91 |
| | 03.1 LH CC scFv | 49.60 |
| | 03.1 LH scFab | 56.54 |
| | 04 LH CC scFv | 53.38 |
| | 04 LH scFab | 57.25 |
| | 04.G2 LH CC scFv | 54.11 |
| | 04.G2 LH scFab | 56.29 |
| CL6 3C1 | 02 CC scFv | 54.79 |
| | 02 scFab | 57.26 |

[0143] These data demonstrate that scFab TCE molecules show higher mean aggregation temperatures compared to the other tested TCE molecules (having an scFv target binder) and are therefore more stable than TCE molecules with an scFv target binder.

### Example: Cell-based CCR8 Binding Competition Assay

[0144] Effects of biochemical competition with CCR8 ligand CCLI on CCR8-binding properties of CCR8-binding TCE molecules and scFab-containing CCR8-binding TCE molecules are assessed by flow cytometry, based on an engineered variant of the human T lymphocyte cell line HuT 78 expressing native CCR8 but not expressing human CD3 epsilon chain. The cell line bore a defined knockout in the CD3E gene.

[0145] Fifty thousand cells are incubated with 200 nM recombinant human CCL1 (Abcam, cat. no. ab9854) (diluted in PBS/2% FCS) or with PBS/2% FCS in 50 μl for 55 min at 4° C. Purified CCR8-binding TCE and scFab-containing CCR8-binding TCE molecules, diluted in PBS/2% FCS, are added to a final concentration of 100 nM in a total volume of 100 μl, followed by incubation at 4° C. for 45 minutes. For a negative control, PBS/2% FCS is added instead of purified CCR8-binding TCE or scFab-containing CCR8-binding TCE molecules. After three washes, bound molecules are detected for 45 minutes at 4° C. with R-Phycoerythrin-conjugated, anti-human IgG, Fc gamma fragment-specific antibody (Jackson, cat. no. 109-116-098), diluted 1:50 in PBS/2% FCS. After three washes, samples are measured on a FACSCanto II instrument (Becton Dickinson). All conditions are performed in three replicates.

[0146] Data are analyzed by FlowJo software (FlowJo/Becton Dickinson), generating median values for PE signals (median PE). From the three replicates per condition, average median PE values (with standard deviations) as well as ratios of average median PE in CCL1-treated setting over average median PE in CCL1-untreated setting were calculated using Excel software (Microsoft).

[0147] According to procedures essentially as described above, the following data were obtained.

[0148] Table 14 shows averages (with standard deviations) of median values of PE-signals, and ratios of average median PE of CCL1-treated condition over CCL1-untreated condition. Identifiers of CCR8-binding TCE molecules and scFab-containing CCR8-binding TCE molecules are indicated in the left column.

[0149] “I2E” represents an scFv that binds CD3. TCE1 TCE molecule (either scFab-12E-scFc or scFv CC×12E×scFc) amino acid sequences are given by SEQ ID NOs: 113-128. TCE8 TCE molecule (either scFab-12E-scFc or scFv CC×12E×scFc) amino acid sequences are given by SEQ ID NOs: 97-112. TCE2 TCE molecule (either scFab-12E-scFc or scFv CC×12E×scFc) amino acid sequences are given by SEQ ID NOs: 49-64.

TABLE 14
CCR8 TCE molecule binding in the presence or absence of CCL1.

| | Average | Average | Ratio |
|---|---|---|---|
| | Median PE, | Median PE, | Average Median PE |
| | CCL1-treated | CCL1-untreated | (+CCL1)/Average |
| TCE molecule | (+CCL1) | (−CCL1) | (−CCL1) |
| TCE1 scFab × I2E × scFc | 27047.33 ± 231.37 | 27174.00 ± 376.72 | 1.00 |
| TCE8 scFab × I2E × scFc | 8799.00 ± 197.89 | 18919.67 ± 250.31 | 0.47 |
| TCE2 scFab × I2E × scFc | 1554.33 ± 15.17 | 2424.33 ± 108.19 | 0.64 |
| TCE1 scFv CC × I2E × scFc | 23129.0 ± 189.7 | 23195.67 ± 368.24 | 1.00 |
| TCE8 scFv CC × I2E × scFc | 7346.00 ± 195.16 | 15940.33 ± 108.19 | 0.46 |
| Negative control | 416.67 ± 58.93 | 374.67 ± 2.49 | 1.11 |

[0150] These data demonstrate that the presence of CCLI did not affect binding of the CCR8-binding TCE molecule TCE1 or scFab-containing CCR8-binding TCE molecule TCE1. In contrast, CCL1 did block binding of TCE8 and TCE2 TCE molecules.

### Example: Evaluation of CCR8-Binding TCE Molecule and scFab-Containing CCR8-Binding TCE Molecule Surface Hydrophobicity

[0151] To determine surface hydrophobicity of scFab-containing CCR8 binding TCE molecules, isolated and formulated CCR8-binding TCE molecule and scFab-containing CCR8-binding TCE molecule monomer adjusted to a defined protein concentration are transferred into autosampler fitting sample vials and measured on a FPLC system. A Hydrophobic Interaction Chromatography (HIC) column is equilibrated with formulation buffer and a defined volume of protein solution applied at a constant formulation buffer flow. Detection is done by OD280 nm optical absorption. Elution behavior is determined by peak shape respectively mathematically calculation of declining signal peak slope. Steeper slope/higher slope values indicate less hydrophobic interaction of the protein surface compared to constructs with more flat elution behavior and lower slope value. Following procedures essentially as described above, the following data were obtained.

[0152] TCE4 TCE molecule (either scFab-12E-scFc or scFv CC×12E×scFc) amino acid sequences are given by SEQ ID NOs: 17-32. TCE1 TCE molecule (either scFab-12E-scFc or scFv CC×I2E×scFc) amino acid sequences are given by SEQ ID NOs: 113-128. TCE8 TCE molecule (either scFab-12E-scFc or scFv CC×12E×scFc) amino acid sequences are given by SEQ ID NOs: 97-112. TCE2 TCE molecule (either scFab-12E-scFc or scFv CC×12E×scFc) amino acid sequences are given by SEQ ID NOs: 49-64. TCE7 TCE molecule (either scFab-12E-scFc or scFv CC×12E×scFc) amino acid sequences are given by SEQ ID NOs: 81-96. TCE5 TCE molecule (either scFab-12E-scFc or scFv CC×12E×scFc) amino acid sequences are given by SEQ ID NOs: 33-48. TCE6 TCE molecule (either scFab-12E-scFc or scFv CC×12E×scFc) amino acid sequences are given by SEQ ID NOs: 65-80. “CC” denotes an engineered cysteine clamp between cysteines at residue 44 of the heavy chain variable region and residue 100 of the light chain variable region of the anti-target scFv.

TABLE 15
HIC elution slopes of CCR8-binding TCE molecules and
scFab-containing CCR8-binding TCE molecules.

| Construct | HIC Elution Slope |
|---|---|
| TCE4 scFab × I2E × scFc | 50.29 |
| TCE4 scFv CC × I2E × scFc | 8.95 |
| TCE1 scFab × I2E × scFc | 50.52 |
| TCE1 scFv CC × I2E × scFc | 34.61 |
| TCE3 scFab × I2E × scFc | 44.97 |
| TCE3 scFv CC × I2E × scFc | 2.50 |
| TCE8 scFab × I2E × scFc | 31.71 |
| TCE8 scFv CC × I2E × scFc | 11.61 |
| TCE2 scFab × I2E × scFc | 53.70 |
| TCE7 scFab × I2E × scFc | 28.59 |
| TCE7 scFv CC × I2E × scFc | 18.44 |
| TCE5 scFab × I2E × scFc | 11.65 |
| TCE5 scFv CC × I2E × scFc | 9.87 |
| TCE6 scFab × I2E × scFc | 8.37 |
| TCE6 scFv CC × I2E × scFc | 8.66 |

[0153] These data demonstrate HIC elution peak slopes for the scFab-containing CCR8-binding TCE molecules are steeper and have higher mathematically values compared to the CCR8-binding TCE molecules having an scFv that binds CCR8.

### Example: CCR8 TCE Molecule Affinity

[0154] Cell-based affinity of CCR8-binding TCE molecules and scFab-containing CCR8-binding TCE molecules is determined by nonlinear regression (one site-specific binding) analysis. CHO cells expressing human CCR8 (SEQ ID NO: 131), cynomolgus monkey CCR8 (SEQ ID NO: 129) or cynomolgus CCR8 (T4R; SEQ ID NO: 130) are incubated with decreasing concentrations of CCR8 bispecific constructs (50-3200 nM, step 1:2, 11 steps) for 16 hours at 4° C. Bound CCR8-binding TCE molecules and scFab-containing CCR8-binding TCE molecules are detected with Alexa Fluor 488-conjugated AffiniPure Fab Fragment Goat Anti-Human IgG (H+L). Fixed cells are stained with DRAQ5, Far-Red Fluorescent Live-Cell Permeant DNA Dye and signals are detected by fluorescence cytometry. Respective equilibrium dissociation constant (Kd) values are calculated with the one site specific binding evaluation tool of the GraphPad Prism software. Mean Kd values and affinity gaps are calculated with Microsoft Excel. Mean Kd values are calculated from two or three independent experiments. The affinity gaps are determined by dividing the cyno Kd by the human Kd. Following procedures essentially as described above, the following data were obtained.

TABLE 16
Cell-based affinities of CCR8-binding TCE molecules and scFab-containing
CCR8-binding TCE molecules.

| | Cell based | Cell based | Affinity | | Affinity gap |
|---|---|---|---|---|---|
| | affinity hu | affinity cyno | gap | Cell based affinity cy | Kdcy |
| | CCR8 Mean | CCR8 Mean Kd | Kdcy/Kdhu | CCR8 (T4R) Mean | (T4R)/Kdhu |
| TCE Molecule | Kd [nM] | [nM] | CCR8 | Kd [nM] | CCR8 |
| TCE4 scFab × I2E × scFc | 11.41 ± 5.34 | 456.40 ± 383.53 | 40.00 | 1263.70 ± 1582.93 | 110.75 |
| TCE4 scFv CC × I2E × scFc | 33.24 ± 7.95 | 795.73 ± 901.90 | 23.94 | 267.90 ± 369.48 | 8.06 |
| TCE1 scFab × I2E × scFc | 0.88 ± 0.080 | 1.58 ± 0.38 | 1.80 | 138.50 ± 66.19 | 157.39 |
| TCE1 scFv CC × I2E × scFc | 0.96 ± 0.26 | 2.00 ± 0.55 | 2.08 | 186.21 ± 258.79 | 193.97 |
| TCE3 scFab × I2E × scFc | 12.84 ± 4.89 | 271.11 ± 219.01 | 21.11 | 5.96E+17 ± 1.03E+18 | 4.64E+16 |
| TCE3 scFv CC × I2E × scFc | 6.86 ± 2.47 | 704.62 ± 740.47 | 102.71 | 142.08 ± 110.91 | 20.71 |
| TCE8 scFab × I2E × scFc | 0.59 ± 0.18 | 442.57 ± 361.67 | 750.12 | 790.07 ± 399.5 | 1339.10 |
| TCE8 scFv CC × I2E × scFc | 2.20 ± 0.91 | 200.83 ± 157.75 | 91.29 | 305.07 ± 243.03 | 138.67 |
| TCE7 scFab × I2E × scFc | 0.88 ± 0.59 | 307.98 ± 238.88 | 349.98 | 706.15 ± 266.51 | 802.44 |
| TCE7 scFv CC × I2E × scFc | 1.13 ± 0.48 | 780.06 ± 831.30 | 690.32 | 322.55 ± 49.71 | 285.44 |
| TCE5 scFab × I2E × scFc | 0.83 ± 0.49 | 234.80 ± 94.47 | 282.89 | 197.45 ± 4.17 | 237.89 |
| TCE5 scFv CC × I2E × scFc | 0.63 ± 0.15 | 342.43 ± 253.83 | 543.54 | 275.10 ± 30.55 | 436.67 |
| TCE6 scFab × I2E × scFc | 0.88 ± 0.20 | 305.84 ± 241.93 | 347.55 | 310.10 ± 184.98 | 352.39 |
| TCE6 scFv CC × I2E × scFc | 0.61 ± 0.060 | 731.77 ± 530.08 | 1199.62 | 374.45 ± 188.59 | 613.85 |
| TCE2 scFab × I2E × scFc | 21.95 ± 1.76 | 551.74 ± 446.63 | 25.14 | 711.83 ± 710.91 | 32.43 |

[0155] These cell-based affinity measurements demonstrate that TCE molecules such as TCE1, with or without an scFab, have high affinity for both human CCR8 and cynomolgus monkey CCR8 without the T4R mutation. The affinity of the TCE1 TCE molecules was reduced against cynomolgus monkey cells having the T4R mutation.

[0156] In addition, the TCE molecule CCR8 TCE2 was not able to be produced in a sufficient amount. However, the TCE molecule having an scFab moiety (CCR8 TCE2 scFab) was able to be produced, demonstrating that the scFab moiety provides an advantage for molecule production.

### Example: Evaluation of CCR8-Binding TCE Molecule and scFab-Containing CCR8-Binding TCE Molecule Aggregation Temperature

[0157] To measure aggregation temperature, isolated and formulated CCR8-binding TCE molecule and scFab-containing CCR8-binding TCE molecule monomer adjusted to a defined protein concentration are pipetted in duplicates into a 96-well plate and overlaid with paraffin oil. The 96-well plate is transferred to a dynamic light scattering DLS reader capable of heating the plate at a defined rate in a given temperature range. Measurement is performed from 40° C. to 70° C. at a defined rate of temperature increase. Detection is done by dynamic light scattering determining the hydrodynamic radius of the constructs over the temperature ramp. The temperature at begin of increase of hydrodynamic radius is defined as aggregation temperature. Following procedures essentially as described above, the following data were obtained.

TABLE 17
DLS aggregation temperature of CCR8 TCE molecules.

| | Aggregation temperature |
|---|---|
| TCE Molecule | [° C.] |
| TCE4 scFab × I2E × scFc | 60.18 |
| TCE4 scFv CC × I2E × scFc | 56.83 |
| TCE1 scFab × I2E × scFc | 58.20 |
| TCE1 scFv CC × I2E × scFc | 53.60 |
| TCE3 scFab × I2E × scFc | 55.90 |
| TCE3 scFv CC × I2E × scFc | 48.01 |
| TCE8 scFab × I2E × scFc | 58.44 |
| TCE8 scFv CC × I2E × scFc | 53.82 |
| TCE7 scFab × I2E × scFc | 60.33 |
| TCE7 scFv CC × I2E × scFc | 49.92 |
| TCE5 scFab × I2E × scFc | 60.29 |
| TCE5 scFv CC × I2E × scFc | 46.25 |
| TCE6 scFab × I2E × scFc | 59.89 |
| TCE6 scFv CC × I2E × scFc | 53.27 |
| TCE2 scFab × I2E × scFc | 54.79 |

[0158] According to procedures essentially as described above, scFab-containing CCR8-binding TCE molecules demonstrated higher aggregation temperatures compared to the CCR8-binding TCE molecules having an scFv that binds CCR8. As described above, the TCE molecule CCR8 TCE2 was not able to be produced in a sufficient amount, whereas the TCE molecule having an scFab moiety (CCR8 TCE2 scFab) was able to be produced.

### Example: CCR8 Molecule Cytotoxicity Assay with Unstimulated Human PBMC

[0159] Human peripheral blood mononuclear cells (PBMC) are prepared by Ficoll density gradient centrifugation from enriched lymphocyte preparations (buffy coats), a side product of blood banks collecting blood for transfusions. Buffy coats are supplied by a local blood bank and PBMC are prepared on the same day of blood collection. After Ficoll density centrifugation and extensive washes with Dulbecco's PBS (Gibco), remaining erythrocytes are removed from PBMC via incubation with erythrocyte lysis buffer (155 mM NH₄Cl, 10 mM KHCO₃, 100 μM EDTA). Platelets are removed via the supernatant upon centrifugation of PBMC at 100×g. Remaining lymphocytes mainly encompass B and T lymphocytes, NK cells and monocytes. PBMC are kept in culture at 37° C./5% CO₂ in RPMI medium (Gibco) with 10% FCS (Gibco).

[0160] For depletion of CD14+ cells, human CD14 MicroBeads (Milteny Biotec, MACS, #130-050-201) are used. For depletion of NK cells, human CD56 MicroBeads (MACS, #130-050-401) are used. PBMC are counted and centrifuged for 10 minutes at room temperature with 300×g. The supernatant is discarded, and the cell pellet resuspended in MACS isolation buffer [80 μL/10⁷ cells; PBS (Invitrogen, #20012-043), 0.5% (v/v) FBS (Gibco, #10270-106), 2 mM EDTA (Sigma-Aldrich, #E-6511)]. CD14 MicroBeads and CD56 MicroBeads (20 μL/10⁷ cells) are added and incubated for 15 minutes at 4 to 8° C. The cells are washed with MACS isolation buffer (1-2 mL/10⁷ cells). After centrifugation (see above), supernatant is discarded, and cells are resuspended in MACS isolation buffer (500 μL/108 cells). CD14/CD56 negative cells are isolated using LS Columns (Miltenyi Biotec, #130-042-401). PBMC without CD14+/CD56+ cells are cultured in RPMI complete medium i.e. RPMI1640 (Biochrom AG, #FG1215) supplemented with 10% FBS (Biochrom AG, #S0115), 1× non-essential amino acids (Biochrom AG, #K0293), 10 mM Hepes buffer (Biochrom AG, #L1613), 1 mM sodium pyruvate (Biochrom AG, #L0473) and 100 U/mL penicillin/streptomycin (Biochrom AG, #A2213) at 37° C.

[0161] For the analysis of cell lysis in flow cytometry assays, the fluorescent membrane dye DiOC₁₈ (DiO) (Molecular Probes, #V22886) is used to label human CCR8- or macaque CCR8-transfected CHO cells as target cells and distinguish them from effector cells. Briefly, cells are harvested, washed once with PBS and adjusted to 106 cell/mL in PBS containing 2% (v/v) FBS and the membrane dye DiO (5 μL/10⁶ cells). After incubation for 3 minutes at 37° C., cells are washed twice in complete RPMI medium and the cell number adjusted to 1.25×10⁵ cells/mL. The vitality of cells is determined using the NC-250 cell counter (Chemometec)

[0162] To quantify the lysis of cyno or human CCR8-transfected CHO cells in the presence of serial dilutions of CCR8-binding TCE molecule or scFab-containing CCR8-binding TCE molecule, equal volumes of DiO-labeled target cells and effector cells (i.e., PBMC w/o CD14⁺ cells) are mixed, resulting in an E:T cell ratio of 10:1. 80 μl of this suspension is transferred to each well of a 96-well plate. 20 μL of serial dilutions of the CCR8-binding TCE molecule or scFab-containing CCR8-binding TCE molecule and a negative control (a CD3-based TCE molecule recognizing an irrelevant target antigen) or RPMI complete medium as an additional negative control are added. The TCE molecule or scFab-containing TCE molecule-mediated cytotoxic reaction proceeded for 48 hours in a 7% CO₂ humidified incubator. Cells are transferred to a new 96-well plate and loss of target cell membrane integrity is monitored by adding propidium iodide (PI) at a final concentration of 1 μg/mL. PI is a membrane impermeable dye that normally is excluded from viable cells, whereas dead cells take it up and become identifiable by fluorescent emission.

[0163] Samples are measured by flow cytometry on an iQue Plus instrument and analyzed by Forecyt software (both from Intellicyt). Target cells are identified as DiO-positive cells. PI-negative target cells are classified as living target cells. Percentage of cytotoxicity is calculated as number of dead targets cells/number of target cells×100. Using GraphPad Prism 5 software (Graph Pad Software, San Diego), the percentage of cytotoxicity is plotted against the corresponding TCE molecule or scFab-containing TCE molecule concentrations. Dose response curves are analyzed with the four parametric logistic regression models for evaluation of sigmoid dose response curves with fixed hill slope and EC₅₀ values are calculated.

[0164] Following procedures essentially as described above, data from a 48-hour FACS-based cytotoxicity assay of scFab-containing CCR8-binding TCE molecule with human CCR8 transfected CHO cells (clone #A2) and human CCR8 isoform A27G (SEQ ID NO: 132) transfected CHO cells as target cells and unstimulated human PBMC (CD14−/CD56−) as effector cells (E:T ratio 10:1) is shown below in Table 18.

TABLE 18
48-hour FACS based cytotoxicity assay of
scFab-containing CCR8-binding TCE molecules.

| | #A2 EC₅₀ | A27G EC₅₀ |
|---|---|---|
| TCE Molecule | [pM] | [pM] |
| CCR8 TCE1 scFab × | 14.39 | 15.68 |
| I2E × scFc | | |
| CCR8 TCE8 scFab × | 7.26 | 5.93 |
| I2E × scFc | | |
| CCR8 TCE2 scFab × | 290 | 342 |
| I2E × scFc | | |

[0165] These data demonstrate that binder TCE1 and TCE8 show comparable bioactivity in a one-to two-digit pM range.

[0166] Data from a 48-hour FACS-based cytotoxicity assay of bispecific constructs with Chinese cynomolgus CCR8 (SEQ ID NO: 129) transfected CHO cells (clone #G4) and the mauritian cyno CCR8 isoform T4R (SEQ ID NO: 130) transfected CHO cells as target cells and unstimulated human PBMC (CD14−/CD56−) as effector cells (E:T ratio 10:1) is shown below in Table 19.

TABLE 19
48-hour FACS based cytotoxicity assay of CCR8
scFab-containing CCR8-binding TCE molecules.

| | #G4 EC₅₀ | T4R EC₅₀ |
|---|---|---|
| TCE Molecule | [pM] | [pM] |
| CCR8 TCE1 | 3.91 | X |
| scFab × I2E × scFc | | |
| CCR8 TCE8 | X | X |
| scFab × I2E × scFc | | |
| CCR8 TCE2 | X | X |
| scFab × I2E × scFc | | |

[0167] These data demonstrate that only the tested TCE1 TCE molecule (having a scFab targeting CCR8) shows pM bioactivity on the chinese cynomolgus monkey CCR8 transfected CHO cell line. The other tested molecules demonstrated no activity (as depicted by “X” in the table).

[0168] Data from a 48-hour FACS-based cytotoxicity assay of CCR8-binding TCE molecule and scFab-containing CCR8-binding TCE molecule with HUT-78 (CD3+) as target cells and unstimulated human PBMC (CD14−/CD56−) as effector cells (E:T ratio 10:1) is shown below in Table 20. EC₅₀ values are determined by the four parametric logistic regression models for evaluation of sigmoid dose response curves with fixed hill slope.

TABLE 20
48-hour FACS based cytotoxicity assay of CCR8-binding TCE
molecules and scFab-containing CCR8-binding TCE molecules.

| TCE Molecule | EC₅₀ [pM] |
|---|---|
| CCR8 TCE4 scFab × I2E × scFc | 1246 |
| CCR8 TCE4 scFv × I2E × scFc | 265 |
| CCR8 TCE1 scFab × I2E × scFc | 46.9 |
| CCR8 TCE1 scFv × I2E × scFc | 58.2 |
| CCR8 TCE3 scFab × I2E × scFc | 478 |
| CCR8 TCE3 scFv × I2E × scFc | 28112 |
| CCR8 TCE8 scFab × I2E × scFc | 416 |
| CCR8 TCE8 scFv × I2E × scFc | 1565 |
| CCR8 TCE5 scFab × I2E × scFc | 506 |
| CCR8 TCE5 scFv × I2E × scFc | 2695 |
| CCR8 TCE7 scFab × I2E × scFc | 413 |
| CCR8 TCE7 scFv × I2E × scFc | 3269 |
| CCR8 TCE6 scFab × I2E × scFc | 576 |
| CCR8 TCE6 scFv × I2E × scFc | 354 |
| CCR8 TCE2 scFab × I2E × scFc | 3510 |

[0169] These data demonstrate that binder TCE1 shows high bioactivity on the endogenous cell line HUT-78 (CD3+).

### Example: Luciferase-Based Cytotoxicity Assay With Unstimulated Human PBMC

[0170] Isolation of effector cells and depletion of CD14⁺ and CD56⁺ cells are performed as described above. Target cells (described below) are harvested, spun down, and adjusted to 1.2×10⁵ cells/mL in complete RPMI medium. The vitality of cells is determined using Nucleocounter NC-250 (Chemometec) and Solution18 Dye containing Acridine Orange and DAPI (Chemometec).

[0171] To quantify the lysis of target cells in the presence of serial dilutions of CCR8-binding TCE molecules or scFab-containing CCR8-binding TCE molecules, equal volumes of luciferase-positive target cells and effector cells (i.e., PBMC w/o CD14⁺; CD56⁺ cells) are mixed, resulting in an E:T cell ratio of 10:1. 42 μL of this suspension is transferred to each well of a 384-well plate. 8 μL of serial dilutions of the corresponding CCR8-binding TCE molecule or scFab-containing CCR8-binding TCE molecule and a negative control (a CD3-based TCE molecule recognizing an irrelevant target antigen) or RPMI complete medium as an additional negative control are added. The TCE molecule cytotoxic reaction proceeds for 48 hours in a 5% CO₂ humidified incubator. Then, 25 μL substrate (Steady-Glo® Reagent, Promega) is transferred to the 384-well plate. Only living luciferase-positive cells react to the substrate and create a luminescence signal. Samples are measured with a SPARK microplate reader (TECAN) and analyzed by Spark Control Magellan software (TECAN). Percentage of cytotoxicity was calculated as (1-RLU_{Sample}/RLU_{Negative-Control})×100. RLU mean relative light unites. “Negative-Control” means cells without TCE molecule.

[0172] Using GraphPad Prism 7.04 software (Graph Pad Software, San Diego), the percentage of cytotoxicity is plotted against the corresponding multi-specific TCE molecule concentrations. Dose response curves are analyzed with the four parametric logistic regression models for evaluation of sigmoid dose response curves with fixed hill slope and EC₅₀ values are calculated.

[0173] Following procedures essentially as described above, the following data were obtained. Data shown are of CCR8 scFab-containing CCR8-binding TCE molecules against the human CCR8 positive HUT-78 CD3ε-ko cell line (parental cells and clones shown below) or the human CCR8 negative (ko) HUT-78 (CD3ε+) cell line (monoplex clone 2E3; negative control) as target cells, and unstimulated human PBMC (CD14−/CD56−) as effector cells (E:T ratio 10:1).

TABLE 21
48-hour Luciferase-based cytotoxicity assay of CCR8
scFab-containing CCR8-binding TCE molecules.

| | | | | | CCR8 |
|---|---|---|---|---|---|
| | CCR8 positive HUT-78 | | | | negative |
| | Parental | | | | HUT-78 |
| | cells | Monoplex | Monoplex | Monoplex | (CD3ε+) |
| | CCR8+ | clone 2B3 | clone 2E9 | clone 1F9 | Negative |
| | CD3e+ | CD3e− | CD3e− | CD3e− | control |
| Construct | EC₅₀ | | | | |
| TCE1 scFab × | 6.6 | 4.8 | 2.4 | 3.6 | X |
| I2E × scFc | | | | | |
| TCE8 scFab × | 93.1 | 50.7 | 32.6 | 40.1 | X |
| I2E × scFc | | | | | |
| TCE2 scFab × | 4279.4 | 943.3 | 1036.8 | 998.4 | X |
| I2E × scFc | | | | | |

[0174] These data demonstrate that the TCE1 scFab-containing TCE molecule shows a superior bioactivity on the human CCR8 positive HUT-78 (CD3ε−) cell lines compared to TCE8 and TCE2.

### Example: Bispecific Binding and Interspecies Cross-Reactivity

[0175] For confirmation of binding to human CCR8 and CD3 and to cyno CCR8 and CD3, TCE1 scFab-containing CCR8-binding TCE molecule, control TCE molecule (CD3-based TCE molecule recognizing an irrelevant target antigen), or anti-CCR8 antibodies clone L263G8 (BioLegend) and 433H (BD) are tested by flow cytometry using CHO cells transfected with human CCR8 and or macaque CCR8, the human CCR8 and CD3 positive human cell line HUT-78, the human CCR8 positive and CD3 negative HUT-78 cell line, CD3-expressing human T cell leukemia cell line HPB-all (DSMZ, Braunschweig, ACC483), and the cynomolgus CD3-expressing T cell line LnPx 4119.

[0176] Following procedures essentially as described above, the following data were obtained. A “-” indicates that no signal was detected. Data represent mean BL2 (channel in which the signal was detected) of the sample/mean BL2 of the secondary antibody control.

TABLE 22
Binding of TCE molecules to human and
cynomolgus monkey CCR8 and CD3.

| | CCR8 | | Anti | Anti |
|---|---|---|---|---|
| | TCE1 | Control | CCR8 mAb | CCR8 |
| | scFab × | TCE | (Clone | mAb |
| Cell line | I2E × scFc | molecule | L263G8) | (433H) |
| hu CCR8+ CHO | 42 | 1 | 40 | — |
| Cy CCR8+ CHO | 196 | 1 | — | 136 |
| Cy CCR8 (T4R)+ CHO | 1 | 1 | — | 106 |
| Parental CHO | 1 | 1 | — | — |
| HUT-78 (CCR8+/CD3+) | 62 | 72 | 9 | — |
| HUT-78 (CCR8+/CD3−) | 30 | 1 | 6 | — |
| HPB-all | 298 | 398 | — | — |
| LnPx4119 | 33 | 75 | — | — |

[0177] These data demonstrate that the scFab-containing TCE1 TCE molecule bound human CCR8 and cynomolgus monkey CCR8 in human or cyno expressing CHO cells but did not bind the cynomolgus monkey CCR8 having a T4R mutation. These data also demonstrate that TCE1 binds CCR8 expressed on a naturally-expressing CCR8 cell line (HUT-78 CCR8+/CD3e−).

### Example: Epitope Clustering of CCR8 TCE Molecules

[0178] The extracellular domain of human CCR8 comprises three loops and a N-terminal peptide of 35 amino acids. For epitope mapping, the N-terminal peptide of human CCR8 (designated P_1-35 (SEQ ID NO: 133)) is divided into three consecutive segments (designated P_1-12 (SEQ ID NO: 134), P_13-24 (SEQ ID NO: 135), P_25-35 (SEQ ID NO: 136)). To cover the adjacent N- or C-terminal regions of the consecutive segments two additional overlapping fragments (designated P_7-18 (SEQ ID NO: 137 and P_19-30 (SEQ ID NO: 138)) are made. At the C-terminal end of the full-length N-terminal peptide and all truncated N-terminal peptides of human CCR8 described above a V5 tag is fused via a G4S-linker. Following the V5 tag, chicken albumin is fused via a further G4S-linker followed by a FLAG tag, BAP (biotin acceptor protein) for in vivo biotinylation, and H3G, each fused via a SG-linker. All constructs described above are cloned into a pEFDHFR vector and transiently transfected into HEK 293 cells.

[0179] HEK 293 cells (1×10E8) are resuspended in 100 ml FreeStyle expression medium (Gibco 12338-018) and transfected with 4 ml OptiMEM (Gibco 31985-047), 100 μl 293fectin (Invitrogen 12347-019) and 50 μg DNA encoding either the full-length or truncated N-terminal CCR8 constructs according to the manufacturers protocol. Cells are grown in FreeStyle expression medium for 72 hours at 130 rpm in a humidified incubator with 8% CO₂. Cells are centrifuged at 1,500 rpm for 10 minutes and the supernatant is harvested. 10 ml of the supernatant of each of the transfected cells or 9 ml of HEK 293 cells as negative control are 20× concentrated with Amicon Ultra-15 tubes (UFC901008) to 500 μL. For each of the full-length and truncated N-terminal CCR8 constructs as well as HEK 293 negative control, 18×1086 washed streptavidin-beads (Streptavidin Microspheres, 6 μm; Polysciences 24172-1) are resuspended in 500 μL of the concentrated supernatant and incubated slowly shaking for one hour. Beads coupled with the respective antigen or negative control are washed and stored at 4° C. overnight.

[0180] To verify expression and binding of the full-length and truncated N-terminal CCR8 constructs to streptavidin-beads, 2×10F5 beads per staining are incubated with 5 μg/mL of an anti-FLAG antibody (clone M2, Sigma F3165/F1804) and 5 μg/mL of an anti-V5 antibody (clone SV5-Pk1; AbD Serotec, MCA 1360) and a 1:100 dilution of PE-labeled anti mouse Fcy secondary antibody (Jackson 115-116-071). Antigen-bound beads are incubated with three different anti-human CCR8 antibodies. Binding of two of the anti-human CCR8 antibodies (clone L263G8; BioLegend, 360602 and clone 433H; BD 747578; 5 μg/ml each) is detected with a 1:100 dilution of a PE-labeled anti mouse Fcy secondary antibody (Jackson 115-116-071). Binding of anti-human CCR8 antibody (polyclonal; Abcam, ab140796) is detected with a 1:50 dilution of PE-labeled anti goat Fcy secondary antibody (Jackson 109-116-098).

[0181] To evaluate binding of CCR8-binding TCE molecules and scFab-containing CCR8-binding TCE molecules to the full-length and truncated N-terminal CCR8 constructs bound to streptavidin-beads, beads are incubated with 5 μg/mL of the respective TCE molecule. Binding of these CCR8-binding TCE molecules and scFab-containing CCR8-binding TCE molecules is detected using 2 μg/ml of an anti-Histidin-antibody (clone AD1.1.10; AbD Serotec MCA 1396) and a 1:100 dilution of a PE-labeled anti mouse Fcy secondary antibody (Jackson 115-116-071). All antibodies, CCR8-binding TCE molecules, and scFab-containing CCR8-binding TCE molecules are diluted in PBS with 2% FBS and all incubations are performed at 4° C. for 45 minutes (primary antibodies) or for 30 minutes (secondary antibodies). Washes are performed using PBS with 2% FBS and the final suspension buffer prior to FACS analysis is also PBS with 2% FBS. Antibody and TCE binding is detected using an Intellicyte IQue. Changes in mean fluorescence are analyzed with an Intellicyte IQue and FlowJo. Binding to the various full-length and truncated N-terminal CCR8 constructs is reflected as a positive signal detected by flow cytometry.

[0182] Following procedures essentially as described above, expression and binding of the full-length and the various truncated N-terminal CCR8 constructs to streptavidin-beads could be verified by flow cytometry.

TABLE 23a
Flow Cytometry Binding Analysis of CCR8 Antibodies to Full-length
or Truncated N-terminal Peptides of Human CCR8.

| | Peptide or controls | | | | | | | |
|---|---|---|---|---|---|---|---|---|
| | Beads | HEK | | | | | | |
| | (control) | (control) | 1-35 | 1-12 | 7-18 | 13-24 | 19-30 | 25-35 |
| | Median Fluorescence of Sample/Median | | | | | | | |
| Sample | Fluorescence of Negative Control | | | | | | | |
| PBS | 0.9 | 0.9 | 0.9 | 0.9 | 0.9 | 0.9 | 0.9 | 1.9 |
| Flag | 0.9 | 0.9 | 522.0 | 596.0 | 588.7 | 628.1 | 589.5 | 582.0 |
| V5 Tag | 0.9 | 0.9 | 952.6 | 1091.5 | 1085.9 | 1303.2 | 1016.2 | 1094.2 |
| anti-CCR8 | 1.2 | 0.9 | 751.2 | 0.9 | 0.9 | 284.8 | 0.9 | 0.9 |
| (clone | | | | | | | | |
| L263G8) | | | | | | | | |
| anti-CCR8 | 1.8 | 0.9 | 290.2 | 0.9 | 0.9 | 300.3 | 0.9 | 0.9 |
| (clone | | | | | | | | |
| BV510) | | | | | | | | |
| anti-CCR8 | 0.9 | 1.0 | 259.7 | 0.9 | 222.6 | 385.6 | 0.9 | 0.9 |
| (polyclonal) | | | | | | | | |

[0183] These data demonstrate that anti-human CCR8 antibodies bound the full-length N-terminal peptide of human CCR8 P_1-35 indicating they recognized the N-terminal peptide of human CCR8. None of the antibodies showed binding to either streptavidin-beads alone or to the HEK 293 control. The anti-human CCR8 antibodies (clone L263G8 and clone 433H) showed the same binding pattern while the polyclonal anti-human CCR8 antibody showed additional binding to the overlapping fragment P_7-18.

[0184] As shown in Table 23, when binding to the truncated N-terminal peptides of CCR8 was evaluated, CCR8-binding TCE molecules and scFab-containing CCR8-binding TCE molecules showed two different binding patterns. For example, TCE4, TCE3 and TCE8 each bound to the truncated N-terminal peptide P_13-24. However, TCE1 bound to the truncated N-terminal peptide P_1-12.

TABLE 23b
Flow Cytometry Binding Analysis of CCR8 Antibodies and
scFab-containing CCR8-binding TCE molecules to
Full-length or Truncated N-terminal Peptides of Human CCR8.

| | Peptide or controls | | | | | | | |
|---|---|---|---|---|---|---|---|---|
| | Beads | HEK | | | | | | |
| | (control) | (control) | 1-35 | 1-12 | 7-18 | 13-24 | 19-30 | 25-35 |
| | Median Fluorescence of Sample/Median | | | | | | | |
| Construct | Fluorescence of Negative Control | | | | | | | |
| PBS | 1.0 | 1.0 | 1.0 | 1.0 | 1.0 | 1.0 | 1.0 | 1.0 |
| CCR8 TCE1 | 1.2 | 1.1 | 470.8 | 413.5 | 1.0 | 1.1 | 1.1 | 1.1 |
| scFab x 12E x | | | | | | | | |
| scFc | | | | | | | | |
| CCR8 TCE1 | 1.1 | 1.0 | 381.8 | 306.2 | 1.0 | 1.1 | 1.1 | 1.0 |
| scFv x I2E x | | | | | | | | |
| scFc | | | | | | | | |
| CCR8 TCE4 | 1.0 | 1.0 | 1167.5 | 1.0 | 1.0 | 995.6 | 1.1 | 1.1 |
| scFab x I2E x | | | | | | | | |
| scFc | | | | | | | | |
| CCR8 TCE4 | 1.0 | 1.0 | 842.6 | 1.0 | 1.0 | 745.5 | 1.1 | 1.1 |
| scFv x 12E x | | | | | | | | |
| scFc | | | | | | | | |
| CCR8 TCE3 | 1.0 | 1.0 | 1281.6 | 1.0 | 1.0 | 1090.0 | 1.1 | 1.1 |
| scFab x I2E x | | | | | | | | |
| scFc | | | | | | | | |
| CCR8 TCE3 | 1.0 | 1.0 | 1265.9 | 1.1 | 1.0 | 1041.4 | 1.1 | 1.1 |
| scFv x I2E x | | | | | | | | |
| scFc | | | | | | | | |
| CCR8 TCE8 | 1.1 | 1.0 | 1298.3 | 1.0 | 1.0 | 435.6 | 1.1 | 1.1 |
| scFab x I2E x | | | | | | | | |
| scFc | | | | | | | | |
| CCR8 TCE8 | 1.0 | 1.0 | 1081.1 | 1.0 | 1.0 | 381.4 | 1.1 | 1.0 |
| scFv x 12E x | | | | | | | | |
| scFc | | | | | | | | |
| CCR8 TCE5 | 1.1 | 1.0 | 1370.6 | 1.0 | 1.0 | 500.4 | 1.1 | 1.1 |
| scFab x 12E x | | | | | | | | |
| scFc | | | | | | | | |
| CCR8 TCE5 | 1.1 | 1.0 | 1402.0 | 1.0 | 1.0 | 525.6 | 1.1 | 1.2 |
| scFv x 12E x | | | | | | | | |
| scFc | | | | | | | | |
| CCR8 TCE6 | 1.1 | 1.0 | 1289.8 | 1.0 | 1.0 | 441.6 | 1.0 | 1.1 |
| scFab x I2E x | | | | | | | | |
| scFc | | | | | | | | |
| CCR8 TCE6 | 1.5 | 1.1 | 1360.9 | 1.0 | 1.0 | 445.1 | 1.1 | 1.1 |
| scFv x 12E x | | | | | | | | |
| scFc | | | | | | | | |
| CCR8 TCE7 | 1.0 | 1.0 | 1578.8 | 1.0 | 1.0 | 536.0 | 1.1 | 1.1 |
| scFab x 12E x scFc | | | | | | | | |
| CCR8 TCE7 | 1.1 | 1.0 | 1409.5 | 1.0 | 1.0 | 539.5 | 1.1 | 1.1 |
| scFv x I2E x | | | | | | | | |
| scFc | | | | | | | | |
| CCR8 TCE2 | 1.0 | 1.0 | 814.0 | 1.0 | 1.0 | 432.5 | 1.1 | 1.0 |
| scFab x 12E x scFc | | | | | | | | |
| Negative | 1.0 | 1.0 | 1.0 | 1.0 | 1.0 | 1.0 | 1.0 | 1.1 |
| control | | | | | | | | |

[0185] These data demonstrate that CCR8-binding TCE molecules and scFab-containing CCR8-binding TCE molecules bound to the full-length N-terminal CCR8 peptide P_1-35. All molecules except TCE1 bound to the truncated N-terminal CCR8 peptide P_13-24. Interestingly, TCE1 binds to the truncated N-terminal CCR8 peptide P_1-12, suggesting TCE1 binds a unique epitope on CCR8, which is thought to contribute to the high affinity and bioactivity of TCE1.

[0186] Additional scFvs representing a new sequence family that binds in the 1-12 amino acid epitope cluster have been generated and screened by phage display.

SEQUENCES
TCE3 CCR8 scFv and scFab HCDR1
(SEQ ID NO: 1)
SYVMH
TCE3 CCR8 scFv and scFab HCDR2
(SEQ ID NO: 2)
VISYDGSSQYYTDSVKG
TCE3 CCR8 scFv and scFab HCDR3
(SEQ ID NO: 3)
GRLATAILFDY
TCE3 CCR8 scFv and scFab LCDR1
(SEQ ID NO: 4)
KSSQSLLYSDGKTYLF
TCE3 CCR8 scFv and scFab LCDR2
(SEQ ID NO: 5)
EVSNRFS
TCE3 CCR8 scFv and scFab LCDR3
(SEQ ID NO: 6)
MQSIKLPLT
TCE3 CCR8 scFv VH
(SEQ ID NO: 7)
QVQLVESGGGVVQPGRSLRLSCEASGFTFSSYVMHWVRQAPGKCLEWVSVISYDGSSQYYTDS
VKGRFTISRDNSKNTLNLQMNSLRAEDTAVYYCVRGRLATAILFDYWGQGTLVTVSS
TCE3 CCR8 scFv VL
(SEQ ID NO: 8)
EILMTQTPLSLSVTPGQPASISCKSSQSLLYSDGKTYLFWYLQRPGQPPQLLIYEVSNRFSGV
PDRFSGSGSGTDFTLKISRVEAEDVGIYYCMQSIKLPLTFGCGTKVEIK
TCE3 CCR8 scFv
(SEQ ID NO: 9)
QVQLVESGGGVVQPGRSLRLSCEASGFTFSSYVMHWVRQAPGKCLEWVSVISYDGSSQYYTDS
VKGRFTISRDNSKNTLNLQMNSLRAEDTAVYYCVRGRLATAILFDYWGQGTLVTVSSGGGGQG
GGGQGGGGQEILMTQTPLSLSVTPGQPASISCKSSQSLLYSDGKTYLFWYLQRPGQPPQLLIY
EVSNRFSGVPDRFSGSGSGTDFTLKISRVEAEDVGIYYCMQSIKLPLTFGCGTKVEIK
TCE3 scFv (CCR8) x scFv (CD3) TCE
(SEQ ID NO: 10)
QVQLVESGGGVVQPGRSLRLSCEASGFTFSSYVMHWVRQAPGKCLEWVSVISYDGSSQYYTDS
VKGRFTISRDNSKNTLNLQMNSLRAEDTAVYYCVRGRLATAILFDYWGQGTLVTVSSGGGGQG
GGGQGGGGQEILMTQTPLSLSVTPGQPASISCKSSQSLLYSDGKTYLFWYLQRPGQPPQLLIY
EVSNRFSGVPDRFSGSGSGTDFTLKISRVEAEDVGIYYCMQSIKLPLTFGCGTKVEIKSGGGG
QEVQLVESGGGLVQPGGSLKLSCAASGFTFNKYAINWVRQAPGKGLEWVARIRSKYNNYATYY
ADAVKDRFTISRDDSKNTVYLQMNNLKTEDTAVYYCARAGNFGSSYISYWAYWGQGTLVTVSS
GGGGQGGGGQGGGGQQTVVTQEPSLTVSPGGTVTITCGSSTGAVTSGNYPNWVQKKPGQAPRG
LIGGTKFLAPGTPARFSGSLSGGKAALTLSGVQPEDEAEYYCVLWYSNRWVFGSGTKLTVL
TCE3 scFv (CCR8) x scFv (CD3) x scFc
(SEQ ID NO: 11)
QVQLVESGGGVVQPGRSLRLSCEASGFTFSSYVMHWVRQAPGKCLEWVSVISYDGSSQYYTDS
VKGRFTISRDNSKNTLNLQMNSLRAEDTAVYYCVRGRLATAILFDYWGQGTLVTVSSGGGGQG
GGGQGGGGQEILMTQTPLSLSVTPGQPASISCKSSQSLLYSDGKTYLFWYLQRPGQPPQLLIY
EVSNRFSGVPDRFSGSGSGTDFTLKISRVEAEDVGIYYCMQSIKLPLTFGCGTKVEIKSGGGG
QEVQLVESGGGLVQPGGSLKLSCAASGFTFNKYAINWVRQAPGKGLEWVARIRSKYNNYATYY
ADAVKDRFTISRDDSKNTVYLQMNNLKTEDTAVYYCARAGNFGSSYISYWAYWGQGTLVTVSS
GGGGQGGGGQGGGGQQTVVTQEPSLTVSPGGTVTITCGSSTGAVTSGNYPNWVQKKPGQAPRG
LIGGTKFLAPGTPARFSGSLSGGKAALTLSGVQPEDEAEYYCVLWYSNRWVFGSGTKLTVLGG
GGCPPCPAPELLGGPSVFLFPPKPKDTLMISRTPEVTCVVVDVSHEEPEVKFNWYVDGVEVHN
AKTKPCEEQYGSTYRCVSVLTVLHQDWLNGKEYKCKVSNKALPAPIEKTISKAKGQPREPQVY
TLPPSREEMTKNQVSLTCLVKGFYPSDIAVEWESNGQPENNYKTTPPVLDSDGSFFLYSKLTV
DKSRWQQGNVFSCSVMHEALHNHYTQKSLSLSPGKGGGGQGGGGQGGGGQGGGGQGGGGQGGG
GQCPPCPAPELLGGPSVFLFPPKPKDTLMISRTPEVTCVVVDVSHEEPEVKFNWYVDGVEVHN
AKTKPCEEQYGSTYRCVSVLTVLHQDWLNGKEYKCKVSNKALPAPIEKTISKAKGQPREPQVY
TLPPSREEMTKNQVSLTCLVKGFYPSDIAVEWESNGQPENNYKTTPPVLDSDGSFFLYSKLTV
DKSRWQQGNVFSCSVMHEALHNHYTQKSLSLSPGK
TCE3 CCR8 scFab VH and CH1
(SEQ ID NO: 12)
QVQLVESGGGVVQPGRSLRLSCEASGFTFSSYVMHWVRQAPGKGLEWVSVISYDGSSQYYTDS
VKGRFTISRDNSKNTLNLQMNSLRAEDTAVYYCVRGRLATAILFDYWGQGTLVTVSSASTKGP
SVFPLAPSSKSTSGGTAALGCLVKDYFPEPVTVSWNSGALTSGVHTFPAVLQSSGLYSLSSVV
TVPSSSLGTQTYICNVNHKPSNTKVDKKVEPKSC
TCE3 CCR8 scFab VL and Ck
(SEQ ID NO: 13)
EILMTQTPLSLSVTPGQPASISCKSSQSLLYSDGKTYLFWYLQRPGQPPQLLIYEVSNRFSGV
PDRFSGSGSGTDFTLKISRVEAEDVGIYYCMQSIKLPLTFGGGTKVEIKRTVAAPSVFIFPPS
DEQLKSGTASVVCLLNNFYPREAKVQWKVDNALQSGNSQESVTEQDSKDSTYSLSSTLTLSKA
DYEKHKVYACEVTHQGLSSPVTKSFNRGEC
TCE3 CCR8 scFab
(SEQ ID NO: 14)
QVQLVESGGGVVQPGRSLRLSCEASGFTFSSYVMHWVRQAPGKGLEWVSVISYDGSSQYYTDS
VKGRFTISRDNSKNTLNLQMNSLRAEDTAVYYCVRGRLATAILFDYWGQGTLVTVSSASTKGP
SVFPLAPSSKSTSGGTAALGCLVKDYFPEPVTVSWNSGALTSGVHTFPAVLQSSGLYSLSSVV
TVPSSSLGTQTYICNVNHKPSNTKVDKKVEPKSCGGGGQGGGGQGGGGQGGGGQGGGGQGGGG
QGGGGQGGGGQEILMTQTPLSLSVTPGQPASISCKSSQSLLYSDGKTYLFWYLQRPGQPPQLL
IYEVSNRFSGVPDRFSGSGSGTDFTLKISRVEAEDVGIYYCMQSIKLPLTFGGGTKVEIKRTV
AAPSVFIFPPSDEQLKSGTASVVCLLNNFYPREAKVQWKVDNALQSGNSQESVTEQDSKDSTY
SLSSTLTLSKADYEKHKVYACEVTHQGLSSPVTKSFNRGEC
TCE3 scFab (CCR8) x scFv (CD3) TCE
(SEQ ID NO: 15)
QVQLVESGGGVVQPGRSLRLSCEASGFTFSSYVMHWVRQAPGKGLEWVSVISYDGSSQYYTDS
VKGRFTISRDNSKNTLNLQMNSLRAEDTAVYYCVRGRLATAILFDYWGQGTLVTVSSASTKGP
SVFPLAPSSKSTSGGTAALGCLVKDYFPEPVTVSWNSGALTSGVHTFPAVLQSSGLYSLSSVV
TVPSSSLGTQTYICNVNHKPSNTKVDKKVEPKSCGGGGQGGGGQGGGGQGGGGQGGGGQGGGG
QGGGGQGGGGQEILMTQTPLSLSVTPGQPASISCKSSQSLLYSDGKTYLFWYLQRPGQPPQLL
IYEVSNRFSGVPDRFSGSGSGTDFTLKISRVEAEDVGIYYCMQSIKLPLTFGGGTKVEIKRTV
AAPSVFIFPPSDEQLKSGTASVVCLLNNFYPREAKVQWKVDNALQSGNSQESVTEQDSKDSTY
SLSSTLTLSKADYEKHKVYACEVTHQGLSSPVTKSFNRGECSGGGGQEVQLVESGGGLVQPGG
SLKLSCAASGFTFNKYAINWVRQAPGKGLEWVARIRSKYNNYATYYADAVKDRFTISRDDSKN
TVYLQMNNLKTEDTAVYYCARAGNFGSSYISYWAYWGQGTLVTVSSGGGGQGGGGQGGGGQQT
VVTQEPSLTVSPGGTVTITCGSSTGAVTSGNYPNWVQKKPGQAPRGLIGGTKFLAPGTPARFS
GSLSGGKAALTLSGVQPEDEAEYYCVLWYSNRWVFGSGTKLTVL
TCE3 scFab (CCR8) x scFv (CD3) x scFc
(SEQ ID NO: 16)
QVQLVESGGGVVQPGRSLRLSCEASGFTFSSYVMHWVRQAPGKGLEWVSVISYDGSSQYYTDS
VKGRFTISRDNSKNTLNLQMNSLRAEDTAVYYCVRGRLATAILFDYWGQGTLVTVSSASTKGP
SVFPLAPSSKSTSGGTAALGCLVKDYFPEPVTVSWNSGALTSGVHTFPAVLQSSGLYSLSSVV
TVPSSSLGTQTYICNVNHKPSNTKVDKKVEPKSCGGGGQGGGGQGGGGQGGGGQGGGGQGGGG
QGGGGQGGGGQEILMTQTPLSLSVTPGQPASISCKSSQSLLYSDGKTYLFWYLQRPGQPPQLL
IYEVSNRFSGVPDRFSGSGSGTDFTLKISRVEAEDVGIYYCMQSIKLPLTFGGGTKVEIKRTV
AAPSVFIFPPSDEQLKSGTASVVCLLNNFYPREAKVQWKVDNALQSGNSQESVTEQDSKDSTY
SLSSTLTLSKADYEKHKVYACEVTHQGLSSPVTKSFNRGECSGGGGQEVQLVESGGGLVQPGG
SLKLSCAASGFTFNKYAINWVRQAPGKGLEWVARIRSKYNNYATYYADAVKDRFTISRDDSKN
TVYLQMNNLKTEDTAVYYCARAGNFGSSYISYWAYWGQGTLVTVSSGGGGQGGGGQGGGGQQT
VVTQEPSLTVSPGGTVTITCGSSTGAVTSGNYPNWVQKKPGQAPRGLIGGTKFLAPGTPARFS
GSLSGGKAALTLSGVQPEDEAEYYCVLWYSNRWVFGSGTKLTVLGGGGCPPCPAPELLGGPSV
FLFPPKPKDTLMISRTPEVTCVVVDVSHEEPEVKFNWYVDGVEVHNAKTKPCEEQYGSTYRCV
SVLTVLHQDWLNGKEYKCKVSNKALPAPIEKTISKAKGQPREPQVYTLPPSREEMTKNQVSLT
CLVKGFYPSDIAVEWESNGQPENNYKTTPPVLDSDGSFFLYSKLTVDKSRWQQGNVFSCSVMH
EALHNHYTQKSLSLSPGKGGGGQGGGGQGGGGQGGGGQGGGGQGGGGQCPPCPAPELLGGPSV
FLFPPKPKDTLMISRTPEVTCVVVDVSHEEPEVKFNWYVDGVEVHNAKTKPCEEQYGSTYRCV
SVLTVLHQDWLNGKEYKCKVSNKALPAPIEKTISKAKGQPREPQVYTLPPSREEMTKNQVSLT
CLVKGFYPSDIAVEWESNGQPENNYKTTPPVLDSDGSFFLYSKLTVDKSRWQQGNVFSCSVMH
EALHNHYTQKSLSLSPGK
TCE4 CCR8 scFv and scFab HCDR1
(SEQ ID NO: 17)
SYGMH
TCE4 CCR8 scFv and scFab HCDR2
(SEQ ID NO: 18)
VISYDGSNKYYADSVKG
TCE4 CCR8 scFv and scFab HCDR3
(SEQ ID NO: 19)
GRYFDWFLFDY
TCE4 CCR8 scFv and scFab LCDR1
(SEQ ID NO: 20)
KSSQSLLHSDGKTYLF
TCE4 CCR8 scFv and scFab LCDR2
(SEQ ID NO: 21)
EVSNRFS
TCE4 CCR8 scFv and scFab LCDR3
(SEQ ID NO: 22)
MQSLRLPLT
TCE4 CCR8 scFv VH (CCR8)
(SEQ ID NO: 23)
QVQLVESGGGVVQPGRSLRLSCAASGFTFSSYGMHWVRQAPGKCLEWVAVISYDGSNKYYADS
VKGRFTISRDNSKNTLYLQMNSLRAEDTAVYYCARGRYFDWFLFDYWGQGTLVTVSS
TCE4 CCR8 scFv VL (CCR8)
(SEQ ID NO: 24)
DTVMTQTPLSLSVTPGQPASISCKSSQSLLHSDGKTYLFWYLQKPGQPPQLLISEVSNRFSGV
PDRFSGSGSGTDFTLKISRVEAEDVGFYYCMQSLRLPLTFGCGTKVEIK
TCE4 CCR8 scFv
(SEQ ID NO: 25)
QVQLVESGGGVVQPGRSLRLSCAASGFTFSSYGMHWVRQAPGKCLEWVAVISYDGSNKYYADS
VKGRFTISRDNSKNTLYLQMNSLRAEDTAVYYCARGRYFDWFLFDYWGQGTLVTVSSGGGGQG
GGGQGGGGQDTVMTQTPLSLSVTPGQPASISCKSSQSLLHSDGKTYLFWYLQKPGQPPQLLIS
EVSNRFSGVPDRFSGSGSGTDFTLKISRVEAEDVGFYYCMQSLRLPLTFGCGTKVEIK
TCE4 scFv (CCR8) x scFv (CD3) TCE
(SEQ ID NO: 26)
QVQLVESGGGVVQPGRSLRLSCAASGFTFSSYGMHWVRQAPGKCLEWVAVISYDGSNKYYADS
VKGRFTISRDNSKNTLYLQMNSLRAEDTAVYYCARGRYFDWFLFDYWGQGTLVTVSSGGGGQG
GGGQGGGGQDTVMTQTPLSLSVTPGQPASISCKSSQSLLHSDGKTYLFWYLQKPGQPPQLLIS
EVSNRFSGVPDRFSGSGSGTDFTLKISRVEAEDVGFYYCMQSLRLPLTFGCGTKVEIKSGGGG
QEVQLVESGGGLVQPGGSLKLSCAASGFTFNKYAINWVRQAPGKGLEWVARIRSKYNNYATYY
ADAVKDRFTISRDDSKNTVYLQMNNLKTEDTAVYYCARAGNFGSSYISYWAYWGQGTLVTVSS
GGGGQGGGGQGGGGQQTVVTQEPSLTVSPGGTVTITCGSSTGAVTSGNYPNWVQKKPGQAPRG
LIGGTKFLAPGTPARFSGSLSGGKAALTLSGVQPEDEAEYYCVLWYSNRWVFGSGTKLTVL
TCE4 CCR8 scFv (CCR8) x scFv (CD3) TCE x scFc
(SEQ ID NO: 27)
QVQLVESGGGVVQPGRSLRLSCAASGFTFSSYGMHWVRQAPGKCLEWVAVISYDGSNKYYADS
VKGRFTISRDNSKNTLYLQMNSLRAEDTAVYYCARGRYFDWFLFDYWGQGTLVTVSSGGGGQG
GGGQGGGGQDTVMTQTPLSLSVTPGQPASISCKSSQSLLHSDGKTYLFWYLQKPGQPPQLLIS
EVSNRFSGVPDRFSGSGSGTDFTLKISRVEAEDVGFYYCMQSLRLPLTFGCGTKVEIKSGGGG
QEVQLVESGGGLVQPGGSLKLSCAASGFTFNKYAINWVRQAPGKGLEWVARIRSKYNNYATYY
ADAVKDRFTISRDDSKNTVYLQMNNLKTEDTAVYYCARAGNFGSSYISYWAYWGQGTLVTVSS
GGGGQGGGGQGGGGQQTVVTQEPSLTVSPGGTVTITCGSSTGAVTSGNYPNWVQKKPGQAPRG
LIGGTKFLAPGTPARFSGSLSGGKAALTLSGVQPEDEAEYYCVLWYSNRWVFGSGTKLTVLGG
GGCPPCPAPELLGGPSVFLFPPKPKDTLMISRTPEVTCVVVDVSHEEPEVKFNWYVDGVEVHN
AKTKPCEEQYGSTYRCVSVLTVLHQDWLNGKEYKCKVSNKALPAPIEKTISKAKGQPREPQVY
TLPPSREEMTKNQVSLTCLVKGFYPSDIAVEWESNGQPENNYKTTPPVLDSDGSFFLYSKLTV
DKSRWQQGNVFSCSVMHEALHNHYTQKSLSLSPGKGGGGQGGGGQGGGGQGGGGQGGGGQGGG
GQCPPCPAPELLGGPSVFLFPPKPKDTLMISRTPEVTCVVVDVSHEEPEVKFNWYVDGVEVHN
AKTKPCEEQYGSTYRCVSVLTVLHQDWLNGKEYKCKVSNKALPAPIEKTISKAKGQPREPQVY
TLPPSREEMTKNQVSLTCLVKGFYPSDIAVEWESNGQPENNYKTTPPVLDSDGSFFLYSKLTV
DKSRWQQGNVFSCSVMHEALHNHYTQKSLSLSPGK
TCE4 CCR8 scFab VH and CH1
(SEQ ID NO: 28)
QVQLVESGGGVVQPGRSLRLSCAASGFTFSSYGMHWVRQAPGKGLEWVAVISYDGSNKYYADS
VKGRFTISRDNSKNTLYLQMNSLRAEDTAVYYCARGRYFDWFLFDYWGQGTLVTVSSASTKGP
SVFPLAPSSKSTSGGTAALGCLVKDYFPEPVTVSWNSGALTSGVHTFPAVLQSSGLYSLSSVV
TVPSSSLGTQTYICNVNHKPSNTKVDKKVEPKSC
TCE4 CCR8 scFab VL and Ck
(SEQ ID NO: 29)
DTVMTQTPLSLSVTPGQPASISCKSSQSLLHSDGKTYLFWYLQKPGQPPQLLISEVSNRFSGV
PDRFSGSGSGTDFTLKISRVEAEDVGFYYCMQSLRLPLTFGGGTKVEIKRTVAAPSVFIFPPS
DEQLKSGTASVVCLLNNFYPREAKVQWKVDNALQSGNSQESVTEQDSKDSTYSLSSTLTLSKA
DYEKHKVYACEVTHQGLSSPVTKSFNRGEC
TCE4 CCR8 scFab
(SEQ ID NO: 30)
QVQLVESGGGVVQPGRSLRLSCAASGFTFSSYGMHWVRQAPGKGLEWVAVISYDGSNKYYADS
VKGRFTISRDNSKNTLYLQMNSLRAEDTAVYYCARGRYFDWFLFDYWGQGTLVTVSSASTKGP
SVFPLAPSSKSTSGGTAALGCLVKDYFPEPVTVSWNSGALTSGVHTFPAVLQSSGLYSLSSVV
TVPSSSLGTQTYICNVNHKPSNTKVDKKVEPKSCGGGGQGGGGQGGGGQGGGGQGGGGQGGGG
QGGGGQGGGGQDTVMTQTPLSLSVTPGQPASISCKSSQSLLHSDGKTYLFWYLQKPGQPPQLL
ISEVSNRFSGVPDRFSGSGSGTDFTLKISRVEAEDVGFYYCMQSLRLPLTFGGGTKVEIKRTV
AAPSVFIFPPSDEQLKSGTASVVCLLNNFYPREAKVQWKVDNALQSGNSQESVTEQDSKDSTY
SLSSTLTLSKADYEKHKVYACEVTHQGLSSPVTKSFNRGEC
TCE4 scFab (CCR8) x scFv (CD3) TCE
(SEQ ID NO: 31)
QVQLVESGGGVVQPGRSLRLSCAASGFTFSSYGMHWVRQAPGKGLEWVAVISYDGSNKYYADS
VKGRFTISRDNSKNTLYLQMNSLRAEDTAVYYCARGRYFDWFLFDYWGQGTLVTVSSASTKGP
SVFPLAPSSKSTSGGTAALGCLVKDYFPEPVTVSWNSGALTSGVHTFPAVLQSSGLYSLSSVV
TVPSSSLGTQTYICNVNHKPSNTKVDKKVEPKSCGGGGQGGGGQGGGGQGGGGQGGGGQGGGG
QGGGGQGGGGQDTVMTQTPLSLSVTPGQPASISCKSSQSLLHSDGKTYLFWYLQKPGQPPQLL
ISEVSNRFSGVPDRFSGSGSGTDFTLKISRVEAEDVGFYYCMQSLRLPLTFGGGTKVEIKRTV
AAPSVFIFPPSDEQLKSGTASVVCLLNNFYPREAKVQWKVDNALQSGNSQESVTEQDSKDSTY
SLSSTLTLSKADYEKHKVYACEVTHQGLSSPVTKSFNRGECSGGGGQEVQLVESGGGLVQPGG
SLKLSCAASGFTFNKYAINWVRQAPGKGLEWVARIRSKYNNYATYYADAVKDRFTISRDDSKN
TVYLQMNNLKTEDTAVYYCARAGNFGSSYISYWAYWGQGTLVTVSSGGGGQGGGGQGGGGQQT
VVTQEPSLTVSPGGTVTITCGSSTGAVTSGNYPNWVQKKPGQAPRGLIGGTKFLAPGTPARFS
GSLSGGKAALTLSGVQPEDEAEYYCVLWYSNRWVFGSGTKLTVL
TCE4 CCR8 scFab (CCR8) x scFv (CD3) x scFc
(SEQ ID NO: 32)
QVQLVESGGGVVQPGRSLRLSCAASGFTFSSYGMHWVRQAPGKGLEWVAVISYDGSNKYYADS
VKGRFTISRDNSKNTLYLQMNSLRAEDTAVYYCARGRYFDWFLFDYWGQGTLVTVSSASTKGP
SVFPLAPSSKSTSGGTAALGCLVKDYFPEPVTVSWNSGALTSGVHTFPAVLQSSGLYSLSSVV
TVPSSSLGTQTYICNVNHKPSNTKVDKKVEPKSCGGGGQGGGGQGGGGQGGGGQGGGGQGGGG
QGGGGQGGGGQDTVMTQTPLSLSVTPGQPASISCKSSQSLLHSDGKTYLFWYLQKPGQPPQLL
ISEVSNRFSGVPDRFSGSGSGTDFTLKISRVEAEDVGFYYCMQSLRLPLTFGGGTKVEIKRTV
AAPSVFIFPPSDEQLKSGTASVVCLLNNFYPREAKVQWKVDNALQSGNSQESVTEQDSKDSTY
SLSSTLTLSKADYEKHKVYACEVTHQGLSSPVTKSFNRGECSGGGGQEVQLVESGGGLVQPGG
SLKLSCAASGFTFNKYAINWVRQAPGKGLEWVARIRSKYNNYATYYADAVKDRFTISRDDSKN
TVYLQMNNLKTEDTAVYYCARAGNFGSSYISYWAYWGQGTLVTVSSGGGGQGGGGQGGGGQQT
VVTQEPSLTVSPGGTVTITCGSSTGAVTSGNYPNWVQKKPGQAPRGLIGGTKFLAPGTPARFS
GSLSGGKAALTLSGVQPEDEAEYYCVLWYSNRWVFGSGTKLTVLGGGGCPPCPAPELLGGPSV
FLFPPKPKDTLMISRTPEVTCVVVDVSHEEPEVKFNWYVDGVEVHNAKTKPCEEQYGSTYRCV
SVLTVLHQDWLNGKEYKCKVSNKALPAPIEKTISKAKGQPREPQVYTLPPSREEMTKNQVSLT
CLVKGFYPSDIAVEWESNGQPENNYKTTPPVLDSDGSFFLYSKLTVDKSRWQQGNVFSCSVMH
EALHNHYTQKSLSLSPGKGGGGQGGGGQGGGGQGGGGQGGGGQGGGGQCPPCPAPELLGGPSV
FLFPPKPKDTLMISRTPEVTCVVVDVSHEEPEVKFNWYVDGVEVHNAKTKPCEEQYGSTYRCV
SVLTVLHQDWLNGKEYKCKVSNKALPAPIEKTISKAKGQPREPQVYTLPPSREEMTKNQVSLT
CLVKGFYPSDIAVEWESNGQPENNYKTTPPVLDSDGSFFLYSKLTVDKSRWQQGNVFSCSVMH
EALHNHYTQKSLSLSPGK
TCE5 CCR8 scFv and scFab HCDR1
(SEQ ID NO: 33)
NAWMS
TCE5 CCR8 scFv and scFab HCDR2
(SEQ ID NO: 34)
RIKRKTDGGTTDYAAPVKG
TCE5 CCR8 scFv and scFab HCDR3
(SEQ ID NO: 35)
VTLVRGVIFDY
TCE5 CCR8 scFv and scFab LCDR1
(SEQ ID NO: 36)
RVSQSVSSSQLA
TCE5 CCR8 scFv and scFab LCDR2
(SEQ ID NO: 37)
GASSRAT
TCE5 CCR8 scFv and scFab LCDR3
(SEQ ID NO: 38)
QQYGNSRT
TCE5 CCR8 scFv VH (CCR8)
(SEQ ID NO: 39)
EVQLVESGGGLVKPGGSLRLACAASGFIFSNAWMSWVRQAPGKCLEWVGRIKRKTDGGTTDYA
APVKGRFTISRDDSKNTLYLLMNSLKIEDTAVYYCTVVTLVRGVIFDYWGQGTLVTVSS
TCE5 CCR8 scFv VL (CCR8)
(SEQ ID NO: 40)
EIVLTQFPGTLSLSPGESATLSCRVSQSVSSSQLAWYQQKPGQAPRLLIYGASSRATGIPDRF
SGSGSGTDFTLIISRLEPEDFAVYYCQQYGNSRTFGCGTKVEIK
TCE5 CCR8 scFv
(SEQ ID NO: 41)
EVQLVESGGGLVKPGGSLRLACAASGFIFSNAWMSWVRQAPGKCLEWVGRIKRKTDGGTTDYA
APVKGRFTISRDDSKNTLYLLMNSLKIEDTAVYYCTVVTLVRGVIFDYWGQGTLVTVSSGGGG
QGGGGQGGGGQEIVLTQFPGTLSLSPGESATLSCRVSQSVSSSQLAWYQQKPGQAPRLLIYGA
SSRATGIPDRFSGSGSGTDFTLIISRLEPEDFAVYYCQQYGNSRTFGCGTKVEIK
TCE5 scFv (CCR8) x scFv (CD3) TCE
(SEQ ID NO: 42)
EVQLVESGGGLVKPGGSLRLACAASGFIFSNAWMSWVRQAPGKCLEWVGRIKRKTDGGTTDYA
APVKGRFTISRDDSKNTLYLLMNSLKIEDTAVYYCTVVTLVRGVIFDYWGQGTLVTVSSGGGG
QGGGGQGGGGQEIVLTQFPGTLSLSPGESATLSCRVSQSVSSSQLAWYQQKPGQAPRLLIYGA
SSRATGIPDRFSGSGSGTDFTLIISRLEPEDFAVYYCQQYGNSRTFGCGTKVEIKSGGGGQEV
QLVESGGGLVQPGGSLKLSCAASGFTFNKYAINWVRQAPGKGLEWVARIRSKYNNYATYYADA
VKDRFTISRDDSKNTVYLQMNNLKTEDTAVYYCARAGNFGSSYISYWAYWGQGTLVTVSSGGG
GQGGGGQGGGGQQTVVTQEPSLTVSPGGTVTITCGSSTGAVTSGNYPNWVQKKPGQAPRGLIG
GTKFLAPGTPARFSGSLSGGKAALTLSGVQPEDEAEYYCVLWYSNRWVFGSGTKLTVL
TCE5 scFv (CCR8) x scFv (CD3) x scFc
(SEQ ID NO: 43)
EVQLVESGGGLVKPGGSLRLACAASGFIFSNAWMSWVRQAPGKCLEWVGRIKRKTDGGTTDYA
APVKGRFTISRDDSKNTLYLLMNSLKIEDTAVYYCTVVTLVRGVIFDYWGQGTLVTVSSGGGG
QGGGGQGGGGQEIVLTQFPGTLSLSPGESATLSCRVSQSVSSSQLAWYQQKPGQAPRLLIYGA
SSRATGIPDRFSGSGSGTDFTLIISRLEPEDFAVYYCQQYGNSRTFGCGTKVEIKSGGGGQEV
QLVESGGGLVQPGGSLKLSCAASGFTFNKYAINWVRQAPGKGLEWVARIRSKYNNYATYYADA
VKDRFTISRDDSKNTVYLQMNNLKTEDTAVYYCARAGNFGSSYISYWAYWGQGTLVTVSSGGG
GQGGGGQGGGGQQTVVTQEPSLTVSPGGTVTITCGSSTGAVTSGNYPNWVQKKPGQAPRGLIG
GTKFLAPGTPARFSGSLSGGKAALTLSGVQPEDEAEYYCVLWYSNRWVFGSGTKLTVLGGGGC
PPCPAPELLGGPSVFLFPPKPKDTLMISRTPEVTCVVVDVSHEEPEVKFNWYVDGVEVHNAKT
KPCEEQYGSTYRCVSVLTVLHQDWLNGKEYKCKVSNKALPAPIEKTISKAKGQPREPQVYTLP
PSREEMTKNQVSLTCLVKGFYPSDIAVEWESNGQPENNYKTTPPVLDSDGSFFLYSKLTVDKS
RWQQGNVFSCSVMHEALHNHYTQKSLSLSPGKGGGGQGGGGQGGGGQGGGGQGGGGQGGGGQC
PPCPAPELLGGPSVFLFPPKPKDTLMISRTPEVTCVVVDVSHEEPEVKFNWYVDGVEVHNAKT
KPCEEQYGSTYRCVSVLTVLHQDWLNGKEYKCKVSNKALPAPIEKTISKAKGQPREPQVYTLP
PSREEMTKNQVSLTCLVKGFYPSDIAVEWESNGQPENNYKTTPPVLDSDGSFFLYSKLTVDKS
RWQQGNVFSCSVMHEALHNHYTQKSLSLSPGK
TCE5 CCR8 scFab VH and CH1
(SEQ ID NO: 44)
EVQLVESGGGLVKPGGSLRLACAASGFIFSNAWMSWVRQAPGKGLEWVGRIKRKTDGGTTDYA
APVKGRFTISRDDSKNTLYLLMNSLKIEDTAVYYCTVVTLVRGVIFDYWGQGTLVTVSSASTK
GPSVFPLAPSSKSTSGGTAALGCLVKDYFPEPVTVSWNSGALTSGVHTFPAVLQSSGLYSLSS
VVTVPSSSLGTQTYICNVNHKPSNTKVDKKVEPKSC
TCE5 CCR8 scFab VL and Ck
(SEQ ID NO: 45)
EIVLTQFPGTLSLSPGESATLSCRVSQSVSSSQLAWYQQKPGQAPRLLIYGASSRATGIPDRF
SGSGSGTDFTLIISRLEPEDFAVYYCQQYGNSRTFGQGTKVEIKRTVAAPSVFIFPPSDEQLK
SGTASVVCLLNNFYPREAKVQWKVDNALQSGNSQESVTEQDSKDSTYSLSSTLTLSKADYEKH
KVYACEVTHQGLSSPVTKSFNRGEC
TCE5 CCR8 scFab
(SEQ ID NO: 46)
EVQLVESGGGLVKPGGSLRLACAASGFIFSNAWMSWVRQAPGKGLEWVGRIKRKTDGGTTDYA
APVKGRFTISRDDSKNTLYLLMNSLKIEDTAVYYCTVVTLVRGVIFDYWGQGTLVTVSSASTK
GPSVFPLAPSSKSTSGGTAALGCLVKDYFPEPVTVSWNSGALTSGVHTFPAVLQSSGLYSLSS
VVTVPSSSLGTQTYICNVNHKPSNTKVDKKVEPKSCGGGGQGGGGQGGGGQGGGGQGGGGQGG
GGQGGGGQGGGGQEIVLTQFPGTLSLSPGESATLSCRVSQSVSSSQLAWYQQKPGQAPRLLIY
GASSRATGIPDRFSGSGSGTDFTLIISRLEPEDFAVYYCQQYGNSRTFGQGTKVEIKRTVAAP
SVFIFPPSDEQLKSGTASVVCLLNNFYPREAKVQWKVDNALQSGNSQESVTEQDSKDSTYSLS
STLTLSKADYEKHKVYACEVTHQGLSSPVTKSFNRGEC
TCE5 scFab (CCR8) x scFv (CD3)
(SEQ ID NO: 47)
EVQLVESGGGLVKPGGSLRLACAASGFIFSNAWMSWVRQAPGKGLEWVGRIKRKTDGGTTDYA
APVKGRFTISRDDSKNTLYLLMNSLKIEDTAVYYCTVVTLVRGVIFDYWGQGTLVTVSSASTK
GPSVFPLAPSSKSTSGGTAALGCLVKDYFPEPVTVSWNSGALTSGVHTFPAVLQSSGLYSLSS
VVTVPSSSLGTQTYICNVNHKPSNTKVDKKVEPKSCGGGGQGGGGQGGGGQGGGGQGGGGQGG
GGQGGGGQGGGGQEIVLTQFPGTLSLSPGESATLSCRVSQSVSSSQLAWYQQKPGQAPRLLIY
GASSRATGIPDRFSGSGSGTDFTLIISRLEPEDFAVYYCQQYGNSRTFGQGTKVEIKRTVAAP
SVFIFPPSDEQLKSGTASVVCLLNNFYPREAKVQWKVDNALQSGNSQESVTEQDSKDSTYSLS
STLTLSKADYEKHKVYACEVTHQGLSSPVTKSFNRGECSGGGGQEVQLVESGGGLVQPGGSLK
LSCAASGFTFNKYAINWVRQAPGKGLEWVARIRSKYNNYATYYADAVKDRFTISRDDSKNTVY
LQMNNLKTEDTAVYYCARAGNFGSSYISYWAYWGQGTLVTVSSGGGGQGGGGQGGGGQQTVVT
QEPSLTVSPGGTVTITCGSSTGAVTSGNYPNWVQKKPGQAPRGLIGGTKFLAPGTPARFSGSL
SGGKAALTLSGVQPEDEAEYYCVLWYSNRWVFGSGTKLTVL
TCE5 scFab (CCR8) x scFv (CD3) x scFc
(SEQ ID NO: 48)
EVQLVESGGGLVKPGGSLRLACAASGFIFSNAWMSWVRQAPGKGLEWVGRIKRKTDGGTTDYA
APVKGRFTISRDDSKNTLYLLMNSLKIEDTAVYYCTVVTLVRGVIFDYWGQGTLVTVSSASTK
GPSVFPLAPSSKSTSGGTAALGCLVKDYFPEPVTVSWNSGALTSGVHTFPAVLQSSGLYSLSS
VVTVPSSSLGTQTYICNVNHKPSNTKVDKKVEPKSCGGGGQGGGGQGGGGQGGGGQGGGGQGG
GGQGGGGQGGGGQEIVLTQFPGTLSLSPGESATLSCRVSQSVSSSQLAWYQQKPGQAPRLLIY
GASSRATGIPDRFSGSGSGTDFTLIISRLEPEDFAVYYCQQYGNSRTFGQGTKVEIKRTVAAP
SVFIFPPSDEQLKSGTASVVCLLNNFYPREAKVQWKVDNALQSGNSQESVTEQDSKDSTYSLS
STLTLSKADYEKHKVYACEVTHQGLSSPVTKSFNRGECSGGGGQEVQLVESGGGLVQPGGSLK
LSCAASGFTFNKYAINWVRQAPGKGLEWVARIRSKYNNYATYYADAVKDRFTISRDDSKNTVY
LQMNNLKTEDTAVYYCARAGNFGSSYISYWAYWGQGTLVTVSSGGGGQGGGGQGGGGQQTVVT
QEPSLTVSPGGTVTITCGSSTGAVTSGNYPNWVQKKPGQAPRGLIGGTKFLAPGTPARFSGSL
SGGKAALTLSGVQPEDEAEYYCVLWYSNRWVFGSGTKLTVLGGGGCPPCPAPELLGGPSVFLF
PPKPKDTLMISRTPEVTCVVVDVSHEEPEVKFNWYVDGVEVHNAKTKPCEEQYGSTYRCVSVL
TVLHQDWLNGKEYKCKVSNKALPAPIEKTISKAKGQPREPQVYTLPPSREEMTKNQVSLTCLV
KGFYPSDIAVEWESNGQPENNYKTTPPVLDSDGSFFLYSKLTVDKSRWQQGNVFSCSVMHEAL
HNHYTQKSLSLSPGKGGGGQGGGGQGGGGQGGGGQGGGGQGGGGQCPPCPAPELLGGPSVFLF
PPKPKDTLMISRTPEVTCVVVDVSHEEPEVKFNWYVDGVEVHNAKTKPCEEQYGSTYRCVSVL
TVLHQDWLNGKEYKCKVSNKALPAPIEKTISKAKGQPREPQVYTLPPSREEMTKNQVSLTCLV
KGFYPSDIAVEWESNGQPENNYKTTPPVLDSDGSFFLYSKLTVDKSRWQQGNVFSCSVMHEAL
HNHYTQKSLSLSPGK
TCE2 CCR8 scFv and scFab HCDR1
(SEQ ID NO: 49)
NYGMH
TCE2 CCR8 scFv and scFab HCDR2
(SEQ ID NO: 50)
VISYDGSNKFYADSVKG
TCE2 CCR8 scFv and scFab HCDR3
(SEQ ID NO: 51)
AGGIGRFDY
TCE2 CCR8 scFv and scFab LCDR1
(SEQ ID NO: 52)
KYSQSLLHSDGKTYLF
TCE2 CCR8 scFv and scFab LCDR2
(SEQ ID NO: 53)
EVSNRFS
TCE2 CCR8 scFv and scFab LCDR3
(SEQ ID NO: 54)
MQTLKLPLT
TCE2 CCR8 scFv VH
(SEQ ID NO: 55)
QVQLVESGGGVVQPGRSLRLSCAASGFTFSNYGMHWVRQAPGKCLEWVAVISYDGSNKFYADS
VKGRFTISRDNSKKTLYLQMSSLRVEDTAVYYCARAGGIGRFDYWGQGTLVTVSS
TCE2 CCR8 scFv VL
(SEQ ID NO: 56)
DFVMTQTPLSLSVTPGQPASISCKYSQSLLHSDGKTYLFWYLQKPGQPPHLLIYEVSNRFSGV
PDRFSGSGSGTDFTLKISRVEAEDVGLYYCMQTLKLPLTFGCGTKVEIN
TCE2 CCR8 scFv
(SEQ ID NO: 57)
QVQLVESGGGVVQPGRSLRLSCAASGFTFSNYGMHWVRQAPGKCLEWVAVISYDGSNKFYADS
VKGRFTISRDNSKKTLYLQMSSLRVEDTAVYYCARAGGIGRFDYWGQGTLVTVSSGGGGQGGG
GQGGGGQDFVMTQTPLSLSVTPGQPASISCKYSQSLLHSDGKTYLFWYLQKPGQPPHLLIYEV
SNRFSGVPDRFSGSGSGTDFTLKISRVEAEDVGLYYCMQTLKLPLTFGCGTKVEIN
TCE2 scFv (CCR8) x scFv (CD3)
(SEQ ID NO: 58)
QVQLVESGGGVVQPGRSLRLSCAASGFTFSNYGMHWVRQAPGKCLEWVAVISYDGSNKFYADS
VKGRFTISRDNSKKTLYLQMSSLRVEDTAVYYCARAGGIGRFDYWGQGTLVTVSSGGGGQGGG
GQGGGGQDFVMTQTPLSLSVTPGQPASISCKYSQSLLHSDGKTYLFWYLQKPGQPPHLLIYEV
SNRFSGVPDRFSGSGSGTDFTLKISRVEAEDVGLYYCMQTLKLPLTFGCGTKVEINSGGGGQE
VQLVESGGGLVQPGGSLKLSCAASGFTFNKYAINWVRQAPGKGLEWVARIRSKYNNYATYYAD
AVKDRFTISRDDSKNTVYLQMNNLKTEDTAVYYCARAGNFGSSYISYWAYWGQGTLVTVSSGG
GGQGGGGQGGGGQQTVVTQEPSLTVSPGGTVTITCGSSTGAVTSGNYPNWVQKKPGQAPRGLI
GGTKFLAPGTPARFSGSLSGGKAALTLSGVQPEDEAEYYCVLWYSNRWVFGSGTKLTVL
TCE2 scFv (CCR8) x scFv (CD3) x scFc
(SEQ ID NO: 59)
QVQLVESGGGVVQPGRSLRLSCAASGFTFSNYGMHWVRQAPGKCLEWVAVISYDGSNKFYADS
VKGRFTISRDNSKKTLYLQMSSLRVEDTAVYYCARAGGIGRFDYWGQGTLVTVSSGGGGQGGG
GQGGGGQDFVMTQTPLSLSVTPGQPASISCKYSQSLLHSDGKTYLFWYLQKPGQPPHLLIYEV
SNRFSGVPDRFSGSGSGTDFTLKISRVEAEDVGLYYCMQTLKLPLTFGCGTKVEINSGGGGQE
VQLVESGGGLVQPGGSLKLSCAASGFTFNKYAINWVRQAPGKGLEWVARIRSKYNNYATYYAD
AVKDRFTISRDDSKNTVYLQMNNLKTEDTAVYYCARAGNFGSSYISYWAYWGQGTLVTVSSGG
GGQGGGGQGGGGQQTVVTQEPSLTVSPGGTVTITCGSSTGAVTSGNYPNWVQKKPGQAPRGLI
GGTKFLAPGTPARFSGSLSGGKAALTLSGVQPEDEAEYYCVLWYSNRWVFGSGTKLTVLGGGG
CPPCPAPELLGGPSVFLFPPKPKDTLMISRTPEVTCVVVDVSHEEPEVKFNWYVDGVEVHNAK
TKPCEEQYGSTYRCVSVLTVLHQDWLNGKEYKCKVSNKALPAPIEKTISKAKGQPREPQVYTL
PPSREEMTKNQVSLTCLVKGFYPSDIAVEWESNGQPENNYKTTPPVLDSDGSFFLYSKLTVDK
SRWQQGNVFSCSVMHEALHNHYTQKSLSLSPGKGGGGQGGGGQGGGGQGGGGQGGGGQGGGGQ
CPPCPAPELLGGPSVFLFPPKPKDTLMISRTPEVTCVVVDVSHEEPEVKFNWYVDGVEVHNAK
TKPCEEQYGSTYRCVSVLTVLHQDWLNGKEYKCKVSNKALPAPIEKTISKAKGQPREPQVYTL
PPSREEMTKNQVSLTCLVKGFYPSDIAVEWESNGQPENNYKTTPPVLDSDGSFFLYSKLTVDK
SRWQQGNVFSCSVMHEALHNHYTQKSLSLSPGK
TCE2 CCR8 scFab VH and CH1
(SEQ ID NO: 60)
QVQLVESGGGVVQPGRSLRLSCAASGFTFSNYGMHWVRQAPGKGLEWVAVISYDGSNKFYADS
VKGRFTISRDNSKKTLYLQMSSLRVEDTAVYYCARAGGIGRFDYWGQGTLVTVSSASTKGPSV
FPLAPSSKSTSGGTAALGCLVKDYFPEPVTVSWNSGALTSGVHTFPAVLQSSGLYSLSSVVTV
PSSSLGTQTYICNVNHKPSNTKVDKKVEPKSC
TCE2 scFab CCR8 VL and Ck
(SEQ ID NO: 61)
DFVMTQTPLSLSVTPGQPASISCKYSQSLLHSDGKTYLFWYLQKPGQPPHLLIYEVSNRFSGV
PDRFSGSGSGTDFTLKISRVEAEDVGLYYCMQTLKLPLTFGGGTKVEINRTVAAPSVFIFPPS
DEQLKSGTASVVCLLNNFYPREAKVQWKVDNALQSGNSQESVTEQDSKDSTYSLSSTLTLSKA
DYEKHKVYACEVTHQGLSSPVTKSFNRGEC
TCE2 CCR8 scFab
(SEQ ID NO: 62)
QVQLVESGGGVVQPGRSLRLSCAASGFTFSNYGMHWVRQAPGKGLEWVAVISYDGSNKFYADS
VKGRFTISRDNSKKTLYLQMSSLRVEDTAVYYCARAGGIGRFDYWGQGTLVTVSSASTKGPSV
FPLAPSSKSTSGGTAALGCLVKDYFPEPVTVSWNSGALTSGVHTFPAVLQSSGLYSLSSVVTV
PSSSLGTQTYICNVNHKPSNTKVDKKVEPKSCGGGGQGGGGQGGGGQGGGGQGGGGQGGGGQG
GGGQGGGGQDFVMTQTPLSLSVTPGQPASISCKYSQSLLHSDGKTYLFWYLQKPGQPPHLLIY
EVSNRFSGVPDRFSGSGSGTDFTLKISRVEAEDVGLYYCMQTLKLPLTFGGGTKVEINRTVAA
PSVFIFPPSDEQLKSGTASVVCLLNNFYPREAKVQWKVDNALQSGNSQESVTEQDSKDSTYSL
SSTLTLSKADYEKHKVYACEVTHQGLSSPVTKSFNRGEC
TCE2 scFab (CCR8) x scFv (CD3)
(SEQ ID NO: 63)
QVQLVESGGGVVQPGRSLRLSCAASGFTFSNYGMHWVRQAPGKGLEWVAVISYDGSNKFYADS
VKGRFTISRDNSKKTLYLQMSSLRVEDTAVYYCARAGGIGRFDYWGQGTLVTVSSASTKGPSV
FPLAPSSKSTSGGTAALGCLVKDYFPEPVTVSWNSGALTSGVHTFPAVLQSSGLYSLSSVVTV
PSSSLGTQTYICNVNHKPSNTKVDKKVEPKSCGGGGQGGGGQGGGGQGGGGQGGGGQGGGGQG
GGGQGGGGQDFVMTQTPLSLSVTPGQPASISCKYSQSLLHSDGKTYLFWYLQKPGQPPHLLIY
EVSNRFSGVPDRFSGSGSGTDFTLKISRVEAEDVGLYYCMQTLKLPLTFGGGTKVEINRTVAA
PSVFIFPPSDEQLKSGTASVVCLLNNFYPREAKVQWKVDNALQSGNSQESVTEQDSKDSTYSL
SSTLTLSKADYEKHKVYACEVTHQGLSSPVTKSFNRGECSGGGGQEVQLVESGGGLVQPGGSL
KLSCAASGFTFNKYAINWVRQAPGKGLEWVARIRSKYNNYATYYADAVKDRFTISRDDSKNTV
YLQMNNLKTEDTAVYYCARAGNFGSSYISYWAYWGQGTLVTVSSGGGGQGGGGQGGGGQQTVV
TQEPSLTVSPGGTVTITCGSSTGAVTSGNYPNWVQKKPGQAPRGLIGGTKFLAPGTPARFSGS
LSGGKAALTLSGVQPEDEAEYYCVLWYSNRWVFGSGTKLTVL
TCE2 scFab (CCR8) x scFv (CD3) x scFc
(SEQ ID NO: 64)
QVQLVESGGGVVQPGRSLRLSCAASGFTFSNYGMHWVRQAPGKGLEWVAVISYDGSNKFYADS
VKGRFTISRDNSKKTLYLQMSSLRVEDTAVYYCARAGGIGRFDYWGQGTLVTVSSASTKGPSV
FPLAPSSKSTSGGTAALGCLVKDYFPEPVTVSWNSGALTSGVHTFPAVLQSSGLYSLSSVVTV
PSSSLGTQTYICNVNHKPSNTKVDKKVEPKSCGGGGQGGGGQGGGGQGGGGQGGGGQGGGGQG
GGGQGGGGQDFVMTQTPLSLSVTPGQPASISCKYSQSLLHSDGKTYLFWYLQKPGQPPHLLIY
EVSNRFSGVPDRFSGSGSGTDFTLKISRVEAEDVGLYYCMQTLKLPLTFGGGTKVEINRTVAA
PSVFIFPPSDEQLKSGTASVVCLLNNFYPREAKVQWKVDNALQSGNSQESVTEQDSKDSTYSL
SSTLTLSKADYEKHKVYACEVTHQGLSSPVTKSFNRGECSGGGGQEVQLVESGGGLVQPGGSL
KLSCAASGFTFNKYAINWVRQAPGKGLEWVARIRSKYNNYATYYADAVKDRFTISRDDSKNTV
YLQMNNLKTEDTAVYYCARAGNFGSSYISYWAYWGQGTLVTVSSGGGGQGGGGQGGGGQQTVV
TQEPSLTVSPGGTVTITCGSSTGAVTSGNYPNWVQKKPGQAPRGLIGGTKFLAPGTPARFSGS
LSGGKAALTLSGVQPEDEAEYYCVLWYSNRWVFGSGTKLTVLGGGGCPPCPAPELLGGPSVFL
FPPKPKDTLMISRTPEVTCVVVDVSHEEPEVKFNWYVDGVEVHNAKTKPCEEQYGSTYRCVSV
LTVLHQDWLNGKEYKCKVSNKALPAPIEKTISKAKGQPREPQVYTLPPSREEMTKNQVSLTCL
VKGFYPSDIAVEWESNGQPENNYKTTPPVLDSDGSFFLYSKLTVDKSRWQQGNVFSCSVMHEA
LHNHYTQKSLSLSPGKGGGGQGGGGQGGGGQGGGGQGGGGQGGGGQCPPCPAPELLGGPSVFL
FPPKPKDTLMISRTPEVTCVVVDVSHEEPEVKFNWYVDGVEVHNAKTKPCEEQYGSTYRCVSV
LTVLHQDWLNGKEYKCKVSNKALPAPIEKTISKAKGQPREPQVYTLPPSREEMTKNQVSLTCL
VKGFYPSDIAVEWESNGQPENNYKTTPPVLDSDGSFFLYSKLTVDKSRWQQGNVFSCSVMHEA
LHNHYTQKSLSLSPGK
TCE6 CCR8 scFv and scFab HCDR1
(SEQ ID NO: 65)
NAWMS
TCE6 CCR8 scFv and scFab HCDR2
(SEQ ID NO: 66)
RIKRKTDGGTTDYAAPVKG
TCE6 CCR8 scFv and scFab HCDR3
(SEQ ID NO: 67)
VTLVRGIIFDY
TCE6 CCR8 scFv and scFab LCDR1
(SEQ ID NO: 68)
RVSQSVSSSQLA
TCE6 CCR8 scFv and scFab LCDR2
(SEQ ID NO: 69)
GASSRAT
TCE6 CCR8 scFv and scFab LCDR3
(SEQ ID NO: 70)
QQYGNSRT
TCE6 CCR8 scFv VH
(SEQ ID NO: 71)
EVQLVESGGGLVKPGGSLRLSCAASGFIFSNAWMSWVRQAPGKCLEWVGRIKRKTDGGTTDYA
APVKGRFTISRDDSKNTLYLLMNSLKIEDTAVYYCTVVTLVRGIIFDYWGQGTLVTVSS
TCE6 CCR8 scFv VL
(SEQ ID NO: 72)
EIVLTQSPGTLSLSPGESATLSCRVSQSVSSSQLAWYQQKPGQAPRLLIYGASSRATGIPDRF
SGSGSGTDFTLTISRLEPEDFAVYYCQQYGNSRTFGCGTKVEIK
TCE6 CCR8 scFv
(SEQ ID NO: 73)
EVQLVESGGGLVKPGGSLRLSCAASGFIFSNAWMSWVRQAPGKCLEWVGRIKRKTDGGTTDYA
APVKGRFTISRDDSKNTLYLLMNSLKIEDTAVYYCTVVTLVRGIIFDYWGQGTLVTVSSGGGG
QGGGGQGGGGQEIVLTQSPGTLSLSPGESATLSCRVSQSVSSSQLAWYQQKPGQAPRLLIYGA
SSRATGIPDRFSGSGSGTDFTLTISRLEPEDFAVYYCQQYGNSRTFGCGTKVEIK
TCE6 scFv (CCR8) x scFv (CD3)
(SEQ ID NO: 74)
EVQLVESGGGLVKPGGSLRLSCAASGFIFSNAWMSWVRQAPGKCLEWVGRIKRKTDGGTTDYA
APVKGRFTISRDDSKNTLYLLMNSLKIEDTAVYYCTVVTLVRGIIFDYWGQGTLVTVSSGGGG
QGGGGQGGGGQEIVLTQSPGTLSLSPGESATLSCRVSQSVSSSQLAWYQQKPGQAPRLLIYGA
SSRATGIPDRFSGSGSGTDFTLTISRLEPEDFAVYYCQQYGNSRTFGCGTKVEIKSGGGGQEV
QLVESGGGLVQPGGSLKLSCAASGFTFNKYAINWVRQAPGKGLEWVARIRSKYNNYATYYADA
VKDRFTISRDDSKNTVYLQMNNLKTEDTAVYYCARAGNFGSSYISYWAYWGQGTLVTVSSGGG
GQGGGGQGGGGQQTVVTQEPSLTVSPGGTVTITCGSSTGAVTSGNYPNWVQKKPGQAPRGLIG
GTKFLAPGTPARFSGSLSGGKAALTLSGVQPEDEAEYYCVLWYSNRWVFGSGTKLTVL
TCE6 scFv (CCR8) x scFv (CD3) x scFc
(SEQ ID NO: 75)
EVQLVESGGGLVKPGGSLRLSCAASGFIFSNAWMSWVRQAPGKCLEWVGRIKRKTDGGTTDYA
APVKGRFTISRDDSKNTLYLLMNSLKIEDTAVYYCTVVTLVRGIIFDYWGQGTLVTVSSGGGG
QGGGGQGGGGQEIVLTQSPGTLSLSPGESATLSCRVSQSVSSSQLAWYQQKPGQAPRLLIYGA
SSRATGIPDRFSGSGSGTDFTLTISRLEPEDFAVYYCQQYGNSRTFGCGTKVEIKSGGGGQEV
QLVESGGGLVQPGGSLKLSCAASGFTFNKYAINWVRQAPGKGLEWVARIRSKYNNYATYYADA
VKDRFTISRDDSKNTVYLQMNNLKTEDTAVYYCARAGNFGSSYISYWAYWGQGTLVTVSSGGG
GQGGGGQGGGGQQTVVTQEPSLTVSPGGTVTITCGSSTGAVTSGNYPNWVQKKPGQAPRGLIG
GTKFLAPGTPARFSGSLSGGKAALTLSGVQPEDEAEYYCVLWYSNRWVFGSGTKLTVLGGGGC
PPCPAPELLGGPSVFLFPPKPKDTLMISRTPEVTCVVVDVSHEEPEVKFNWYVDGVEVHNAKT
KPCEEQYGSTYRCVSVLTVLHQDWLNGKEYKCKVSNKALPAPIEKTISKAKGQPREPQVYTLP
PSREEMTKNQVSLTCLVKGFYPSDIAVEWESNGQPENNYKTTPPVLDSDGSFFLYSKLTVDKS
RWQQGNVFSCSVMHEALHNHYTQKSLSLSPGKGGGGQGGGGQGGGGQGGGGQGGGGQGGGGQC
PPCPAPELLGGPSVFLFPPKPKDTLMISRTPEVTCVVVDVSHEEPEVKFNWYVDGVEVHNAKT
KPCEEQYGSTYRCVSVLTVLHQDWLNGKEYKCKVSNKALPAPIEKTISKAKGQPREPQVYTLP
PSREEMTKNQVSLTCLVKGFYPSDIAVEWESNGQPENNYKTTPPVLDSDGSFFLYSKLTVDKS
RWQQGNVFSCSVMHEALHNHYTQKSLSLSPGK
TCE6 CCR8 scFab VH and CH1
(SEQ ID NO: 76)
EVQLVESGGGLVKPGGSLRLSCAASGFIFSNAWMSWVRQAPGKGLEWVGRIKRKTDGGTTDYA
APVKGRFTISRDDSKNTLYLLMNSLKIEDTAVYYCTVVTLVRGIIFDYWGQGTLVTVSSASTK
GPSVFPLAPSSKSTSGGTAALGCLVKDYFPEPVTVSWNSGALTSGVHTFPAVLQSSGLYSLSS
VVTVPSSSLGTQTYICNVNHKPSNTKVDKKVEPKSC
TCE6 CCR8 scFab VL and Ck
(SEQ ID NO: 77)
EIVLTQSPGTLSLSPGESATLSCRVSQSVSSSQLAWYQQKPGQAPRLLIYGASSRATGIPDRF
SGSGSGTDFTLTISRLEPEDFAVYYCQQYGNSRTFGQGTKVEIKRTVAAPSVFIFPPSDEQLK
SGTASVVCLLNNFYPREAKVQWKVDNALQSGNSQESVTEQDSKDSTYSLSSTLTLSKADYEKH
KVYACEVTHQGLSSPVTKSFNRGEC
TCE6 CCR8 scFab
(SEQ ID NO: 78)
EVQLVESGGGLVKPGGSLRLSCAASGFIFSNAWMSWVRQAPGKGLEWVGRIKRKTDGGTTDYA
APVKGRFTISRDDSKNTLYLLMNSLKIEDTAVYYCTVVTLVRGIIFDYWGQGTLVTVSSASTK
GPSVFPLAPSSKSTSGGTAALGCLVKDYFPEPVTVSWNSGALTSGVHTFPAVLQSSGLYSLSS
VVTVPSSSLGTQTYICNVNHKPSNTKVDKKVEPKSCGGGGQGGGGQGGGGQGGGGQGGGGQGG
GGQGGGGQGGGGQEIVLTQSPGTLSLSPGESATLSCRVSQSVSSSQLAWYQQKPGQAPRLLIY
GASSRATGIPDRFSGSGSGTDFTLTISRLEPEDFAVYYCQQYGNSRTFGQGTKVEIKRTVAAP
SVFIFPPSDEQLKSGTASVVCLLNNFYPREAKVQWKVDNALQSGNSQESVTEQDSKDSTYSLS
STLTLSKADYEKHKVYACEVTHQGLSSPVTKSFNRGEC
TCE6 scFab (CCR8) x scFv (CD3)
(SEQ ID NO: 79)
EVQLVESGGGLVKPGGSLRLSCAASGFIFSNAWMSWVRQAPGKGLEWVGRIKRKTDGGTTDYA
APVKGRFTISRDDSKNTLYLLMNSLKIEDTAVYYCTVVTLVRGIIFDYWGQGTLVTVSSASTK
GPSVFPLAPSSKSTSGGTAALGCLVKDYFPEPVTVSWNSGALTSGVHTFPAVLQSSGLYSLSS
VVTVPSSSLGTQTYICNVNHKPSNTKVDKKVEPKSCGGGGQGGGGQGGGGQGGGGQGGGGQGG
GGQGGGGQGGGGQEIVLTQSPGTLSLSPGESATLSCRVSQSVSSSQLAWYQQKPGQAPRLLIY
GASSRATGIPDRFSGSGSGTDFTLTISRLEPEDFAVYYCQQYGNSRTFGQGTKVEIKRTVAAP
SVFIFPPSDEQLKSGTASVVCLLNNFYPREAKVQWKVDNALQSGNSQESVTEQDSKDSTYSLS
STLTLSKADYEKHKVYACEVTHQGLSSPVTKSFNRGECSGGGGQEVQLVESGGGLVQPGGSLK
LSCAASGFTFNKYAINWVRQAPGKGLEWVARIRSKYNNYATYYADAVKDRFTISRDDSKNTVY
LQMNNLKTEDTAVYYCARAGNFGSSYISYWAYWGQGTLVTVSSGGGGQGGGGQGGGGQQTVVT
QEPSLTVSPGGTVTITCGSSTGAVTSGNYPNWVQKKPGQAPRGLIGGTKFLAPGTPARFSGSL
SGGKAALTLSGVQPEDEAEYYCVLWYSNRWVFGSGTKLTVL
TCE6 scFab (CCR8) x scFv (CD3) x scFc
(SEQ ID NO: 80)
EVQLVESGGGLVKPGGSLRLSCAASGFIFSNAWMSWVRQAPGKGLEWVGRIKRKTDGGTTDYA
APVKGRFTISRDDSKNTLYLLMNSLKIEDTAVYYCTVVTLVRGIIFDYWGQGTLVTVSSASTK
GPSVFPLAPSSKSTSGGTAALGCLVKDYFPEPVTVSWNSGALTSGVHTFPAVLQSSGLYSLSS
VVTVPSSSLGTQTYICNVNHKPSNTKVDKKVEPKSCGGGGQGGGGQGGGGQGGGGQGGGGQGG
GGQGGGGQGGGGQEIVLTQSPGTLSLSPGESATLSCRVSQSVSSSQLAWYQQKPGQAPRLLIY
GASSRATGIPDRFSGSGSGTDFTLTISRLEPEDFAVYYCQQYGNSRTFGQGTKVEIKRTVAAP
SVFIFPPSDEQLKSGTASVVCLLNNFYPREAKVQWKVDNALQSGNSQESVTEQDSKDSTYSLS
STLTLSKADYEKHKVYACEVTHQGLSSPVTKSFNRGECSGGGGQEVQLVESGGGLVQPGGSLK
LSCAASGFTFNKYAINWVRQAPGKGLEWVARIRSKYNNYATYYADAVKDRFTISRDDSKNTVY
LQMNNLKTEDTAVYYCARAGNFGSSYISYWAYWGQGTLVTVSSGGGGQGGGGQGGGGQQTVVT
QEPSLTVSPGGTVTITCGSSTGAVTSGNYPNWVQKKPGQAPRGLIGGTKFLAPGTPARFSGSL
SGGKAALTLSGVQPEDEAEYYCVLWYSNRWVFGSGTKLTVLGGGGCPPCPAPELLGGPSVFLF
PPKPKDTLMISRTPEVTCVVVDVSHEEPEVKFNWYVDGVEVHNAKTKPCEEQYGSTYRCVSVL
TVLHQDWLNGKEYKCKVSNKALPAPIEKTISKAKGQPREPQVYTLPPSREEMTKNQVSLTCLV
KGFYPSDIAVEWESNGQPENNYKTTPPVLDSDGSFFLYSKLTVDKSRWQQGNVFSCSVMHEAL
HNHYTQKSLSLSPGKGGGGQGGGGQGGGGQGGGGQGGGGQGGGGQCPPCPAPELLGGPSVFLF
PPKPKDTLMISRTPEVTCVVVDVSHEEPEVKFNWYVDGVEVHNAKTKPCEEQYGSTYRCVSVL
TVLHQDWLNGKEYKCKVSNKALPAPIEKTISKAKGQPREPQVYTLPPSREEMTKNQVSLTCLV
KGFYPSDIAVEWESNGQPENNYKTTPPVLDSDGSFFLYSKLTVDKSRWQQGNVFSCSVMHEAL
HNHYTQKSLSLSPGK
TCE7 CCR8 scFv and scFab HCDR1
(SEQ ID NO: 81)
NAWMS
TCE7 CCR8 scFv and scFab HCDR2
(SEQ ID NO: 82)
RIKRKTDGGTTDYAAPVKG
TCE7 CCR8 scFv and scFab HCDR3
(SEQ ID NO: 83)
VTLVRGVIFDY
TCE7 CCR8 scFv and scFab LCDR1
(SEQ ID NO: 84)
RASQSVSSSQLA
TCE7 CCR8 scFv and scFab LCDR2
(SEQ ID NO: 85)
GASSRAT
TCE7 CCR8 scFv and scFab LCDR3
(SEQ ID NO: 86)
QQYGNSRT
TCE7 CCR8 scFv VH
(SEQ ID NO: 87)
EVQLVESGGDLVKPGGSLRLSCAASGFIFSNAWMSWVRQAPGKCLEWVGRIKRKTDGGTTDYA
APVKGRFTISRDDSKNTLYLLMNSLKIEDTAVYYCTVVTLVRGVIFDYWGQGTLVTVSS
TCE7 CCR8 scFv VL
(SEQ ID NO: 88)
EIVLTQSPGTLSLSPGESATLSCRASQSVSSSQLAWYQQKPGQTPRLLIYGASSRATGIPDRF
SGSGSGTDFTLTISRLEPEDFAVYYCQQYGNSRTFGCGTKVEIK
TCE7 CCR8 scFv
(SEQ ID NO: 89)
EVQLVESGGDLVKPGGSLRLSCAASGFIFSNAWMSWVRQAPGKCLEWVGRIKRKTDGGTTDYA
APVKGRFTISRDDSKNTLYLLMNSLKIEDTAVYYCTVVTLVRGVIFDYWGQGTLVTVSSGGGG
QGGGGQGGGGQEIVLTQSPGTLSLSPGESATLSCRASQSVSSSQLAWYQQKPGQTPRLLIYGA
SSRATGIPDRFSGSGSGTDFTLTISRLEPEDFAVYYCQQYGNSRTFGCGTKVEIK
TCE7 scFv (CCR8) x scFv (CD3)
(SEQ ID NO: 90)
EVQLVESGGDLVKPGGSLRLSCAASGFIFSNAWMSWVRQAPGKCLEWVGRIKRKTDGGTTDYA
APVKGRFTISRDDSKNTLYLLMNSLKIEDTAVYYCTVVTLVRGVIFDYWGQGTLVTVSSGGGG
QGGGGQGGGGQEIVLTQSPGTLSLSPGESATLSCRASQSVSSSQLAWYQQKPGQTPRLLIYGA
SSRATGIPDRFSGSGSGTDFTLTISRLEPEDFAVYYCQQYGNSRTFGCGTKVEIKSGGGGQEV
QLVESGGGLVQPGGSLKLSCAASGFTFNKYAINWVRQAPGKGLEWVARIRSKYNNYATYYADA
VKDRFTISRDDSKNTVYLQMNNLKTEDTAVYYCARAGNFGSSYISYWAYWGQGTLVTVSSGGG
GQGGGGQGGGGQQTVVTQEPSLTVSPGGTVTITCGSSTGAVTSGNYPNWVQKKPGQAPRGLIG
GTKFLAPGTPARFSGSLSGGKAALTLSGVQPEDEAEYYCVLWYSNRWVFGSGTKLTVL
TCE7 scFv (CCR8) x scFv (CD3) x scFc
(SEQ ID NO: 91)
EVQLVESGGDLVKPGGSLRLSCAASGFIFSNAWMSWVRQAPGKCLEWVGRIKRKTDGGTTDYA
APVKGRFTISRDDSKNTLYLLMNSLKIEDTAVYYCTVVTLVRGVIFDYWGQGTLVTVSSGGGG
QGGGGQGGGGQEIVLTQSPGTLSLSPGESATLSCRASQSVSSSQLAWYQQKPGQTPRLLIYGA
SSRATGIPDRFSGSGSGTDFTLTISRLEPEDFAVYYCQQYGNSRTFGCGTKVEIKSGGGGQEV
QLVESGGGLVQPGGSLKLSCAASGFTFNKYAINWVRQAPGKGLEWVARIRSKYNNYATYYADA
VKDRFTISRDDSKNTVYLQMNNLKTEDTAVYYCARAGNFGSSYISYWAYWGQGTLVTVSSGGG
GQGGGGQGGGGQQTVVTQEPSLTVSPGGTVTITCGSSTGAVTSGNYPNWVQKKPGQAPRGLIG
GTKFLAPGTPARFSGSLSGGKAALTLSGVQPEDEAEYYCVLWYSNRWVFGSGTKLTVLGGGGC
PPCPAPELLGGPSVFLFPPKPKDTLMISRTPEVTCVVVDVSHEEPEVKFNWYVDGVEVHNAKT
KPCEEQYGSTYRCVSVLTVLHQDWLNGKEYKCKVSNKALPAPIEKTISKAKGQPREPQVYTLP
PSREEMTKNQVSLTCLVKGFYPSDIAVEWESNGQPENNYKTTPPVLDSDGSFFLYSKLTVDKS
RWQQGNVFSCSVMHEALHNHYTQKSLSLSPGKGGGGQGGGGQGGGGQGGGGQGGGGQGGGGQC
PPCPAPELLGGPSVFLFPPKPKDTLMISRTPEVTCVVVDVSHEEPEVKFNWYVDGVEVHNAKT
KPCEEQYGSTYRCVSVLTVLHQDWLNGKEYKCKVSNKALPAPIEKTISKAKGQPREPQVYTLP
PSREEMTKNQVSLTCLVKGFYPSDIAVEWESNGQPENNYKTTPPVLDSDGSFFLYSKLTVDKS
RWQQGNVFSCSVMHEALHNHYTQKSLSLSPGK
TCE7 CCR8 scFab VH and CH1
(SEQ ID NO: 92)
EVQLVESGGDLVKPGGSLRLSCAASGFIFSNAWMSWVRQAPGKGLEWVGRIKRKTDGGTTDYA
APVKGRFTISRDDSKNTLYLLMNSLKIEDTAVYYCTVVTLVRGVIFDYWGQGTLVTVSSASTK
GPSVFPLAPSSKSTSGGTAALGCLVKDYFPEPVTVSWNSGALTSGVHTFPAVLQSSGLYSLSS
VVTVPSSSLGTQTYICNVNHKPSNTKVDKKVEPKSC
TCE7 CCR8 scFab VL and Ck
(SEQ ID NO: 93)
EIVLTQSPGTLSLSPGESATLSCRASQSVSSSQLAWYQQKPGQTPRLLIYGASSRATGIPDRF
SGSGSGTDFTLTISRLEPEDFAVYYCQQYGNSRTFGQGTKVEIKRTVAAPSVFIFPPSDEQLK
SGTASVVCLLNNFYPREAKVQWKVDNALQSGNSQESVTEQDSKDSTYSLSSTLTLSKADYEKH
KVYACEVTHQGLSSPVTKSFNRGEC
TCE7 CCR8 scFab
(SEQ ID NO: 94)
EVQLVESGGDLVKPGGSLRLSCAASGFIFSNAWMSWVRQAPGKGLEWVGRIKRKTDGGTTDYA
APVKGRFTISRDDSKNTLYLLMNSLKIEDTAVYYCTVVTLVRGVIFDYWGQGTLVTVSSASTK
GPSVFPLAPSSKSTSGGTAALGCLVKDYFPEPVTVSWNSGALTSGVHTFPAVLQSSGLYSLSS
VVTVPSSSLGTQTYICNVNHKPSNTKVDKKVEPKSCGGGGQGGGGQGGGGQGGGGQGGGGQGG
GGQGGGGQGGGGQEIVLTQSPGTLSLSPGESATLSCRASQSVSSSQLAWYQQKPGQTPRLLIY
GASSRATGIPDRFSGSGSGTDFTLTISRLEPEDFAVYYCQQYGNSRTFGQGTKVEIKRTVAAP
SVFIFPPSDEQLKSGTASVVCLLNNFYPREAKVQWKVDNALQSGNSQESVTEQDSKDSTYSLS
STLTLSKADYEKHKVYACEVTHQGLSSPVTKSFNRGEC
TCE7 scFab (CCR8) x scFv (CD3)
(SEQ ID NO: 95)
EVQLVESGGDLVKPGGSLRLSCAASGFIFSNAWMSWVRQAPGKGLEWVGRIKRKTDGGTTDYA
APVKGRFTISRDDSKNTLYLLMNSLKIEDTAVYYCTVVTLVRGVIFDYWGQGTLVTVSSASTK
GPSVFPLAPSSKSTSGGTAALGCLVKDYFPEPVTVSWNSGALTSGVHTFPAVLQSSGLYSLSS
VVTVPSSSLGTQTYICNVNHKPSNTKVDKKVEPKSCGGGGQGGGGQGGGGQGGGGQGGGGQGG
GGQGGGGQGGGGQEIVLTQSPGTLSLSPGESATLSCRASQSVSSSQLAWYQQKPGQTPRLLIY
GASSRATGIPDRFSGSGSGTDFTLTISRLEPEDFAVYYCQQYGNSRTFGQGTKVEIKRTVAAP
SVFIFPPSDEQLKSGTASVVCLLNNFYPREAKVQWKVDNALQSGNSQESVTEQDSKDSTYSLS
STLTLSKADYEKHKVYACEVTHQGLSSPVTKSFNRGECSGGGGQEVQLVESGGGLVQPGGSLK
LSCAASGFTFNKYAINWVRQAPGKGLEWVARIRSKYNNYATYYADAVKDRFTISRDDSKNTVY
LQMNNLKTEDTAVYYCARAGNFGSSYISYWAYWGQGTLVTVSSGGGGQGGGGQGGGGQQTVVT
QEPSLTVSPGGTVTITCGSSTGAVTSGNYPNWVQKKPGQAPRGLIGGTKFLAPGTPARFSGSL
SGGKAALTLSGVQPEDEAEYYCVLWYSNRWVFGSGTKLTVL
TCE7 scFab (CCR8) x scFv (CD3) x scFc
(SEQ ID NO: 96)
EVQLVESGGDLVKPGGSLRLSCAASGFIFSNAWMSWVRQAPGKGLEWVGRIKRKTDGGTTDYA
APVKGRFTISRDDSKNTLYLLMNSLKIEDTAVYYCTVVTLVRGVIFDYWGQGTLVTVSSASTK
GPSVFPLAPSSKSTSGGTAALGCLVKDYFPEPVTVSWNSGALTSGVHTFPAVLQSSGLYSLSS
VVTVPSSSLGTQTYICNVNHKPSNTKVDKKVEPKSCGGGGQGGGGQGGGGQGGGGQGGGGQGG
GGQGGGGQGGGGQEIVLTQSPGTLSLSPGESATLSCRASQSVSSSQLAWYQQKPGQTPRLLIY
GASSRATGIPDRFSGSGSGTDFTLTISRLEPEDFAVYYCQQYGNSRTFGQGTKVEIKRTVAAP
SVFIFPPSDEQLKSGTASVVCLLNNFYPREAKVQWKVDNALQSGNSQESVTEQDSKDSTYSLS
STLTLSKADYEKHKVYACEVTHQGLSSPVTKSFNRGECSGGGGQEVQLVESGGGLVQPGGSLK
LSCAASGFTFNKYAINWVRQAPGKGLEWVARIRSKYNNYATYYADAVKDRFTISRDDSKNTVY
LQMNNLKTEDTAVYYCARAGNFGSSYISYWAYWGQGTLVTVSSGGGGQGGGGQGGGGQQTVVT
QEPSLTVSPGGTVTITCGSSTGAVTSGNYPNWVQKKPGQAPRGLIGGTKFLAPGTPARFSGSL
SGGKAALTLSGVQPEDEAEYYCVLWYSNRWVFGSGTKLTVLGGGGCPPCPAPELLGGPSVFLF
PPKPKDTLMISRTPEVTCVVVDVSHEEPEVKFNWYVDGVEVHNAKTKPCEEQYGSTYRCVSVL
TVLHQDWLNGKEYKCKVSNKALPAPIEKTISKAKGQPREPQVYTLPPSREEMTKNQVSLTCLV
KGFYPSDIAVEWESNGQPENNYKTTPPVLDSDGSFFLYSKLTVDKSRWQQGNVFSCSVMHEAL
HNHYTQKSLSLSPGKGGGGQGGGGQGGGGQGGGGQGGGGQGGGGQCPPCPAPELLGGPSVFLF
PPKPKDTLMISRTPEVTCVVVDVSHEEPEVKFNWYVDGVEVHNAKTKPCEEQYGSTYRCVSVL
TVLHQDWLNGKEYKCKVSNKALPAPIEKTISKAKGQPREPQVYTLPPSREEMTKNQVSLTCLV
KGFYPSDIAVEWESNGQPENNYKTTPPVLDSDGSFFLYSKLTVDKSRWQQGNVFSCSVMHEAL
HNHYTQKSLSLSPGK
TCE8 CCR8 scFv and scFab HCDR1
(SEQ ID NO: 97)
NAWMS
TCE8 CCR8 scFv and scFab HCDR2
(SEQ ID NO: 98)
RIKRRTDGGTTDYAAPVKD
TCE8 CCR8 scFv and scFab HCDR3
(SEQ ID NO: 99)
VTMVRGVIADY
TCE8 CCR8 scFv and scFab LCDR1
(SEQ ID NO: 100)
RASQSVSSGSLA
TCE8 CCR8 scFv and scFab LCDR2
(SEQ ID NO: 101)
GASSRAT
TCE8 CCR8 scFv and scFab LCDR3
(SEQ ID NO: 102)
QQYGSSRT
TCE8 CCR8 scFv VH
(SEQ ID NO: 103)
EVQLVESGGGLVKPGGSLRLSCAASGFIFSNAWMSWVRQAPGKCLEWVARIKRRTDGGTTDYA
APVKDRFTISRDDSKNTLFLQMNSLKTEDTAVYYCTTVTMVRGVIADYWGQGTLVTVSS
TCE8 CCR8 scFv VL
(SEQ ID NO: 104)
EIVLTQSPGTLSLSPGERATLSCRASQSVSSGSLAWYQQKLGQAPRLLIYGASSRATGIPDRF
SGSGSGTDFTLTISSLEPEDFAVYYCQQYGSSRTFGCGTKVELK
TCE8 CCR8 scFv
(SEQ ID NO: 105)
EVQLVESGGGLVKPGGSLRLSCAASGFIFSNAWMSWVRQAPGKCLEWVARIKRRTDGGTTDYA
APVKDRFTISRDDSKNTLFLQMNSLKTEDTAVYYCTTVTMVRGVIADYWGQGTLVTVSSGGGG
QGGGGQGGGGQEIVLTQSPGTLSLSPGERATLSCRASQSVSSGSLAWYQQKLGQAPRLLIYGA
SSRATGIPDRFSGSGSGTDFTLTISSLEPEDFAVYYCQQYGSSRTFGCGTKVELK
TCE8 scFv (CCR8) x scFv (CD3)
(SEQ ID NO: 106)
EVQLVESGGGLVKPGGSLRLSCAASGFIFSNAWMSWVRQAPGKCLEWVARIKRRTDGGTTDYA
APVKDRFTISRDDSKNTLFLQMNSLKTEDTAVYYCTTVTMVRGVIADYWGQGTLVTVSSGGGG
QGGGGQGGGGQEIVLTQSPGTLSLSPGERATLSCRASQSVSSGSLAWYQQKLGQAPRLLIYGA
SSRATGIPDRFSGSGSGTDFTLTISSLEPEDFAVYYCQQYGSSRTFGCGTKVELKSGGGGQEV
QLVESGGGLVQPGGSLKLSCAASGFTFNKYAINWVRQAPGKGLEWVARIRSKYNNYATYYADA
VKDRFTISRDDSKNTVYLQMNNLKTEDTAVYYCARAGNFGSSYISYWAYWGQGTLVTVSSGGG
GQGGGGQGGGGQQTVVTQEPSLTVSPGGTVTITCGSSTGAVTSGNYPNWVQKKPGQAPRGLIG
GTKFLAPGTPARFSGSLSGGKAALTLSGVQPEDEAEYYCVLWYSNRWVFGSGTKLTVL
TCE8 scFv (CCR8) x scFv (CD3) x scFc
(SEQ ID NO: 107)
EVQLVESGGGLVKPGGSLRLSCAASGFIFSNAWMSWVRQAPGKCLEWVARIKRRTDGGTTDYA
APVKDRFTISRDDSKNTLFLQMNSLKTEDTAVYYCTTVTMVRGVIADYWGQGTLVTVSSGGGG
QGGGGQGGGGQEIVLTQSPGTLSLSPGERATLSCRASQSVSSGSLAWYQQKLGQAPRLLIYGA
SSRATGIPDRFSGSGSGTDFTLTISSLEPEDFAVYYCQQYGSSRTFGCGTKVELKSGGGGQEV
QLVESGGGLVQPGGSLKLSCAASGFTFNKYAINWVRQAPGKGLEWVARIRSKYNNYATYYADA
VKDRFTISRDDSKNTVYLQMNNLKTEDTAVYYCARAGNFGSSYISYWAYWGQGTLVTVSSGGG
GQGGGGQGGGGQQTVVTQEPSLTVSPGGTVTITCGSSTGAVTSGNYPNWVQKKPGQAPRGLIG
GTKFLAPGTPARFSGSLSGGKAALTLSGVQPEDEAEYYCVLWYSNRWVFGSGTKLTVLGGGGC
PPCPAPELLGGPSVFLFPPKPKDTLMISRTPEVTCVVVDVSHEEPEVKFNWYVDGVEVHNAKT
KPCEEQYGSTYRCVSVLTVLHQDWLNGKEYKCKVSNKALPAPIEKTISKAKGQPREPQVYTLP
PSREEMTKNQVSLTCLVKGFYPSDIAVEWESNGQPENNYKTTPPVLDSDGSFFLYSKLTVDKS
RWQQGNVFSCSVMHEALHNHYTQKSLSLSPGKGGGGQGGGGQGGGGQGGGGQGGGGQGGGGQC
PPCPAPELLGGPSVFLFPPKPKDTLMISRTPEVTCVVVDVSHEEPEVKFNWYVDGVEVHNAKT
KPCEEQYGSTYRCVSVLTVLHQDWLNGKEYKCKVSNKALPAPIEKTISKAKGQPREPQVYTLP
PSREEMTKNQVSLTCLVKGFYPSDIAVEWESNGQPENNYKTTPPVLDSDGSFFLYSKLTVDKS
RWQQGNVFSCSVMHEALHNHYTQKSLSLSPGK
TCE8 CCR8 scFab VH and CH1
(SEQ ID NO: 108)
EVQLVESGGGLVKPGGSLRLSCAASGFIFSNAWMSWVRQAPGKGLEWVARIKRRTDGGTTDYA
APVKDRFTISRDDSKNTLFLQMNSLKTEDTAVYYCTTVTMVRGVIADYWGQGTLVTVSSASTK
GPSVFPLAPSSKSTSGGTAALGCLVKDYFPEPVTVSWNSGALTSGVHTFPAVLQSSGLYSLSS
VVTVPSSSLGTQTYICNVNHKPSNTKVDKKVEPKSC
TCE8 CCR8 scFab VL and CK
(SEQ ID NO: 109)
EIVLTQSPGTLSLSPGERATLSCRASQSVSSGSLAWYQQKLGQAPRLLIYGASSRATGIPDRF
SGSGSGTDFTLTISSLEPEDFAVYYCQQYGSSRTFGQGTKVELKRTVAAPSVFIFPPSDEQLK
SGTASVVCLLNNFYPREAKVQWKVDNALQSGNSQESVTEQDSKDSTYSLSSTLTLSKADYEKH
KVYACEVTHQGLSSPVTKSFNRGEC
TCE8 CCR8 scFab
(SEQ ID NO: 110)
EVQLVESGGGLVKPGGSLRLSCAASGFIFSNAWMSWVRQAPGKGLEWVARIKRRTDGGTTDYA
APVKDRFTISRDDSKNTLFLQMNSLKTEDTAVYYCTTVTMVRGVIADYWGQGTLVTVSSASTK
GPSVFPLAPSSKSTSGGTAALGCLVKDYFPEPVTVSWNSGALTSGVHTFPAVLQSSGLYSLSS
VVTVPSSSLGTQTYICNVNHKPSNTKVDKKVEPKSCGGGGQGGGGQGGGGQGGGGQGGGGQGG
GGQGGGGQGGGGQEIVLTQSPGTLSLSPGERATLSCRASQSVSSGSLAWYQQKLGQAPRLLIY
GASSRATGIPDRFSGSGSGTDFTLTISSLEPEDFAVYYCQQYGSSRTFGQGTKVELKRTVAAP
SVFIFPPSDEQLKSGTASVVCLLNNFYPREAKVQWKVDNALQSGNSQESVTEQDSKDSTYSLS
STLTLSKADYEKHKVYACEVTHQGLSSPVTKSFNRGEC
TCE8 scFab (CCR8) x scFv (CD3)
(SEQ ID NO: 111)
EVQLVESGGGLVKPGGSLRLSCAASGFIFSNAWMSWVRQAPGKGLEWVARIKRRTDGGTTDYA
APVKDRFTISRDDSKNTLFLQMNSLKTEDTAVYYCTTVTMVRGVIADYWGQGTLVTVSSASTK
GPSVFPLAPSSKSTSGGTAALGCLVKDYFPEPVTVSWNSGALTSGVHTFPAVLQSSGLYSLSS
VVTVPSSSLGTQTYICNVNHKPSNTKVDKKVEPKSCGGGGQGGGGQGGGGQGGGGQGGGGQGG
GGQGGGGQGGGGQEIVLTQSPGTLSLSPGERATLSCRASQSVSSGSLAWYQQKLGQAPRLLIY
GASSRATGIPDRFSGSGSGTDFTLTISSLEPEDFAVYYCQQYGSSRTFGQGTKVELKRTVAAP
SVFIFPPSDEQLKSGTASVVCLLNNFYPREAKVQWKVDNALQSGNSQESVTEQDSKDSTYSLS
STLTLSKADYEKHKVYACEVTHQGLSSPVTKSFNRGECSGGGGQEVQLVESGGGLVQPGGSLK
LSCAASGFTFNKYAINWVRQAPGKGLEWVARIRSKYNNYATYYADAVKDRFTISRDDSKNTVY
LQMNNLKTEDTAVYYCARAGNFGSSYISYWAYWGQGTLVTVSSGGGGQGGGGQGGGGQQTVVT
QEPSLTVSPGGTVTITCGSSTGAVTSGNYPNWVQKKPGQAPRGLIGGTKFLAPGTPARFSGSL
SGGKAALTLSGVQPEDEAEYYCVLWYSNRWVFGSGTKLTVL
TCE8 scFab (CCR8) x scFv (CD3) x scFc
(SEQ ID NO: 112)
EVQLVESGGGLVKPGGSLRLSCAASGFIFSNAWMSWVRQAPGKGLEWVARIKRRTDGGTTDYA
APVKDRFTISRDDSKNTLFLQMNSLKTEDTAVYYCTTVTMVRGVIADYWGQGTLVTVSSASTK
GPSVFPLAPSSKSTSGGTAALGCLVKDYFPEPVTVSWNSGALTSGVHTFPAVLQSSGLYSLSS
VVTVPSSSLGTQTYICNVNHKPSNTKVDKKVEPKSCGGGGQGGGGQGGGGQGGGGQGGGGQGG
GGQGGGGQGGGGQEIVLTQSPGTLSLSPGERATLSCRASQSVSSGSLAWYQQKLGQAPRLLIY
GASSRATGIPDRFSGSGSGTDFTLTISSLEPEDFAVYYCQQYGSSRTFGQGTKVELKRTVAAP
SVFIFPPSDEQLKSGTASVVCLLNNFYPREAKVQWKVDNALQSGNSQESVTEQDSKDSTYSLS
STLTLSKADYEKHKVYACEVTHQGLSSPVTKSFNRGECSGGGGQEVQLVESGGGLVQPGGSLK
LSCAASGFTFNKYAINWVRQAPGKGLEWVARIRSKYNNYATYYADAVKDRFTISRDDSKNTVY
LQMNNLKTEDTAVYYCARAGNFGSSYISYWAYWGQGTLVTVSSGGGGQGGGGQGGGGQQTVVT
QEPSLTVSPGGTVTITCGSSTGAVTSGNYPNWVQKKPGQAPRGLIGGTKFLAPGTPARFSGSL
SGGKAALTLSGVQPEDEAEYYCVLWYSNRWVFGSGTKLTVLGGGGCPPCPAPELLGGPSVFLF
PPKPKDTLMISRTPEVTCVVVDVSHEEPEVKFNWYVDGVEVHNAKTKPCEEQYGSTYRCVSVL
TVLHQDWLNGKEYKCKVSNKALPAPIEKTISKAKGQPREPQVYTLPPSREEMTKNQVSLTCLV
KGFYPSDIAVEWESNGQPENNYKTTPPVLDSDGSFFLYSKLTVDKSRWQQGNVFSCSVMHEAL
HNHYTQKSLSLSPGKGGGGQGGGGQGGGGQGGGGQGGGGQGGGGQCPPCPAPELLGGPSVFLF
PPKPKDTLMISRTPEVTCVVVDVSHEEPEVKFNWYVDGVEVHNAKTKPCEEQYGSTYRCVSVL
TVLHQDWLNGKEYKCKVSNKALPAPIEKTISKAKGQPREPQVYTLPPSREEMTKNQVSLTCLV
KGFYPSDIAVEWESNGQPENNYKTTPPVLDSDGSFFLYSKLTVDKSRWQQGNVFSCSVMHEAL
HNHYTQKSLSLSPGK
TCE1 CCR8 scFv and scFab HCDR1
(SEQ ID NO: 113)
NARMG
TCE1 CCR8 scFv and scFab HCDR2
(SEQ ID NO: 114)
RIKSKTEGGTRDYAAPVKG
TCE1 CCR8 scFv and scFab HCDR3
(SEQ ID NO: 115)
YSGV
TCE1 CCR8 scFv and scFab LCDR1
(SEQ ID NO: 116)
KSSQSVLYSSNNKNYLA
TCE1 CCR8 scFv and scFab LCDR2
(SEQ ID NO: 117)
WASTRES
TCE1 CCR8 scFv and scFab LCDR3
(SEQ ID NO: 118)
QQYYSIPIT
TCE1 CCR8 scFv VH
(SEQ ID NO: 119)
EVQLVESGGGLVKPGGSLRLSCAASGFTFSNARMGWVRQAPGKCLEWVGRIKSKTEGGTRDYA
APVKGRFTISRDDSKNTLYLQMNSLKTEDTAVYYCTSYSGVWGQGTMVTVSS
TCE1 CCR8 scFv VL
(SEQ ID NO: 120)
EIVMTQSPDSLAVSLGERATINCKSSQSVLYSSNNKNYLAWYHQKPGQSPKLLISWASTRESG
VPDRFSGSGSGTDFTLTINSLQAEDVAVYYCQQYYSIPITFGCGTKVEIK
TCE1 CCR8 scFv
(SEQ ID NO: 121)
EVQLVESGGGLVKPGGSLRLSCAASGFTFSNARMGWVRQAPGKCLEWVGRIKSKTEGGTRDYA
APVKGRFTISRDDSKNTLYLQMNSLKTEDTAVYYCTSYSGVWGQGTMVTVSSGGGGQGGGGQG
GGGQEIVMTQSPDSLAVSLGERATINCKSSQSVLYSSNNKNYLAWYHQKPGQSPKLLISWAST
RESGVPDRFSGSGSGTDFTLTINSLQAEDVAVYYCQQYYSIPITFGCGTKVEIK
TCE1 scFv (CCR8) x scFv (CD3)
(SEQ ID NO: 122)
EVQLVESGGGLVKPGGSLRLSCAASGFTFSNARMGWVRQAPGKCLEWVGRIKSKTEGGTRDYA
APVKGRFTISRDDSKNTLYLQMNSLKTEDTAVYYCTSYSGVWGQGTMVTVSSGGGGQGGGGQG
GGGQEIVMTQSPDSLAVSLGERATINCKSSQSVLYSSNNKNYLAWYHQKPGQSPKLLISWAST
RESGVPDRFSGSGSGTDFTLTINSLQAEDVAVYYCQQYYSIPITFGCGTKVEIKSGGGGQEVQ
LVESGGGLVQPGGSLKLSCAASGFTFNKYAINWVRQAPGKGLEWVARIRSKYNNYATYYADAV
KDRFTISRDDSKNTVYLQMNNLKTEDTAVYYCARAGNFGSSYISYWAYWGQGTLVTVSSGGGG
QGGGGQGGGGQQTVVTQEPSLTVSPGGTVTITCGSSTGAVTSGNYPNWVQKKPGQAPRGLIGG
TKFLAPGTPARFSGSLSGGKAALTLSGVQPEDEAEYYCVLWYSNRWVFGSGTKLTVL
TCE1 scFv (CCR8) x scFv (CD3) x scFc
(SEQ ID NO: 123)
EVQLVESGGGLVKPGGSLRLSCAASGFTFSNARMGWVRQAPGKCLEWVGRIKSKTEGGTRDYA
APVKGRFTISRDDSKNTLYLQMNSLKTEDTAVYYCTSYSGVWGQGTMVTVSSGGGGQGGGGQG
GGGQEIVMTQSPDSLAVSLGERATINCKSSQSVLYSSNNKNYLAWYHQKPGQSPKLLISWAST
RESGVPDRFSGSGSGTDFTLTINSLQAEDVAVYYCQQYYSIPITFGCGTKVEIKSGGGGQEVQ
LVESGGGLVQPGGSLKLSCAASGFTFNKYAINWVRQAPGKGLEWVARIRSKYNNYATYYADAV
KDRFTISRDDSKNTVYLQMNNLKTEDTAVYYCARAGNFGSSYISYWAYWGQGTLVTVSSGGGG
QGGGGQGGGGQQTVVTQEPSLTVSPGGTVTITCGSSTGAVTSGNYPNWVQKKPGQAPRGLIGG
TKFLAPGTPARFSGSLSGGKAALTLSGVQPEDEAEYYCVLWYSNRWVFGSGTKLTVLGGGGCP
PCPAPELLGGPSVFLFPPKPKDTLMISRTPEVTCVVVDVSHEEPEVKFNWYVDGVEVHNAKTK
PCEEQYGSTYRCVSVLTVLHQDWLNGKEYKCKVSNKALPAPIEKTISKAKGQPREPQVYTLPP
SREEMTKNQVSLTCLVKGFYPSDIAVEWESNGQPENNYKTTPPVLDSDGSFFLYSKLTVDKSR
WQQGNVFSCSVMHEALHNHYTQKSLSLSPGKGGGGQGGGGQGGGGQGGGGQGGGGQGGGGQCP
PCPAPELLGGPSVFLFPPKPKDTLMISRTPEVTCVVVDVSHEEPEVKFNWYVDGVEVHNAKTK
PCEEQYGSTYRCVSVLTVLHQDWLNGKEYKCKVSNKALPAPIEKTISKAKGQPREPQVYTLPP
SREEMTKNQVSLTCLVKGFYPSDIAVEWESNGQPENNYKTTPPVLDSDGSFFLYSKLTVDKSR
WQQGNVFSCSVMHEALHNHYTQKSLSLSPGK
TCE1 CCR8 scFab VH and CH1
(SEQ ID NO: 124)
EVQLVESGGGLVKPGGSLRLSCAASGFTFSNARMGWVRQAPGKGLEWVGRIKSKTEGGTRDYA
APVKGRFTISRDDSKNTLYLQMNSLKTEDTAVYYCTSYSGVWGQGTMVTVSSASTKGPSVFPL
APSSKSTSGGTAALGCLVKDYFPEPVTVSWNSGALTSGVHTFPAVLQSSGLYSLSSVVTVPSS
SLGTQTYICNVNHKPSNTKVDKKVEPKSC
TCE1 CCR8 scFab VL and Ck
(SEQ ID NO: 125)
EIVMTQSPDSLAVSLGERATINCKSSQSVLYSSNNKNYLAWYHQKPGQSPKLLISWASTRESG
VPDRFSGSGSGTDFTLTINSLQAEDVAVYYCQQYYSIPITFGGGTKVEIKRTVAAPSVFIFPP
SDEQLKSGTASVVCLLNNFYPREAKVQWKVDNALQSGNSQESVTEQDSKDSTYSLSSTLTLSK
ADYEKHKVYACEVTHQGLSSPVTKSFNRGEC
TCE1 CCR8 scFab
(SEQ ID NO: 126)
EVQLVESGGGLVKPGGSLRLSCAASGFTFSNARMGWVRQAPGKGLEWVGRIKSKTEGGTRDYA
APVKGRFTISRDDSKNTLYLQMNSLKTEDTAVYYCTSYSGVWGQGTMVTVSSASTKGPSVFPL
APSSKSTSGGTAALGCLVKDYFPEPVTVSWNSGALTSGVHTFPAVLQSSGLYSLSSVVTVPSS
SLGTQTYICNVNHKPSNTKVDKKVEPKSCGGGGQGGGGQGGGGQGGGGQGGGGQGGGGQGGGG
QGGGGQEIVMTQSPDSLAVSLGERATINCKSSQSVLYSSNNKNYLAWYHQKPGQSPKLLISWA
STRESGVPDRFSGSGSGTDFTLTINSLQAEDVAVYYCQQYYSIPITFGGGTKVEIKRTVAAPS
VFIFPPSDEQLKSGTASVVCLLNNFYPREAKVQWKVDNALQSGNSQESVTEQDSKDSTYSLSS
TLTLSKADYEKHKVYACEVTHQGLSSPVTKSFNRGEC
TCE1 scFab (CCR8) x scFv (CD3)
(SEQ ID NO: 127)
EVQLVESGGGLVKPGGSLRLSCAASGFTFSNARMGWVRQAPGKGLEWVGRIKSKTEGGTRDYA
APVKGRFTISRDDSKNTLYLQMNSLKTEDTAVYYCTSYSGVWGQGTMVTVSSASTKGPSVFPL
APSSKSTSGGTAALGCLVKDYFPEPVTVSWNSGALTSGVHTFPAVLQSSGLYSLSSVVTVPSS
SLGTQTYICNVNHKPSNTKVDKKVEPKSCGGGGQGGGGQGGGGQGGGGQGGGGQGGGGQGGGG
QGGGGQEIVMTQSPDSLAVSLGERATINCKSSQSVLYSSNNKNYLAWYHQKPGQSPKLLISWA
STRESGVPDRFSGSGSGTDFTLTINSLQAEDVAVYYCQQYYSIPITFGGGTKVEIKRTVAAPS
VFIFPPSDEQLKSGTASVVCLLNNFYPREAKVQWKVDNALQSGNSQESVTEQDSKDSTYSLSS
TLTLSKADYEKHKVYACEVTHQGLSSPVTKSFNRGECSGGGGQEVQLVESGGGLVQPGGSLKL
SCAASGFTFNKYAINWVRQAPGKGLEWVARIRSKYNNYATYYADAVKDRFTISRDDSKNTVYL
QMNNLKTEDTAVYYCARAGNFGSSYISYWAYWGQGTLVTVSSGGGGQGGGGQGGGGQQTVVTQ
EPSLTVSPGGTVTITCGSSTGAVTSGNYPNWVQKKPGQAPRGLIGGTKFLAPGTPARFSGSLS
GGKAALTLSGVQPEDEAEYYCVLWYSNRWVFGSGTKLTVL
TCE1 scFab (CCR8) x scFv (CD3) x scFc
(SEQ ID NO: 128)
EVQLVESGGGLVKPGGSLRLSCAASGFTFSNARMGWVRQAPGKGLEWVGRIKSKTEGGTRDYA
APVKGRFTISRDDSKNTLYLQMNSLKTEDTAVYYCTSYSGVWGQGTMVTVSSASTKGPSVFPL
APSSKSTSGGTAALGCLVKDYFPEPVTVSWNSGALTSGVHTFPAVLQSSGLYSLSSVVTVPSS
SLGTQTYICNVNHKPSNTKVDKKVEPKSCGGGGQGGGGQGGGGQGGGGQGGGGQGGGGQGGGG
QGGGGQEIVMTQSPDSLAVSLGERATINCKSSQSVLYSSNNKNYLAWYHQKPGQSPKLLISWA
STRESGVPDRFSGSGSGTDFTLTINSLQAEDVAVYYCQQYYSIPITFGGGTKVEIKRTVAAPS
VFIFPPSDEQLKSGTASVVCLLNNFYPREAKVQWKVDNALQSGNSQESVTEQDSKDSTYSLSS
TLTLSKADYEKHKVYACEVTHQGLSSPVTKSFNRGECSGGGGQEVQLVESGGGLVQPGGSLKL
SCAASGFTFNKYAINWVRQAPGKGLEWVARIRSKYNNYATYYADAVKDRFTISRDDSKNTVYL
QMNNLKTEDTAVYYCARAGNFGSSYISYWAYWGQGTLVTVSSGGGGQGGGGQGGGGQQTVVTQ
EPSLTVSPGGTVTITCGSSTGAVTSGNYPNWVQKKPGQAPRGLIGGTKFLAPGTPARFSGSLS
GGKAALTLSGVQPEDEAEYYCVLWYSNRWVFGSGTKLTVLGGGGCPPCPAPELLGGPSVFLFP
PKPKDTLMISRTPEVTCVVVDVSHEEPEVKFNWYVDGVEVHNAKTKPCEEQYGSTYRCVSVLT
VLHQDWLNGKEYKCKVSNKALPAPIEKTISKAKGQPREPQVYTLPPSREEMTKNQVSLTCLVK
GFYPSDIAVEWESNGQPENNYKTTPPVLDSDGSFFLYSKLTVDKSRWQQGNVFSCSVMHEALH
NHYTQKSLSLSPGKGGGGQGGGGQGGGGQGGGGQGGGGQGGGGQCPPCPAPELLGGPSVFLFP
PKPKDTLMISRTPEVTCVVVDVSHEEPEVKFNWYVDGVEVHNAKTKPCEEQYGSTYRCVSVLT
VLHQDWLNGKEYKCKVSNKALPAPIEKTISKAKGQPREPQVYTLPPSREEMTKNQVSLTCLVK
GFYPSDIAVEWESNGQPENNYKTTPPVLDSDGSFFLYSKLTVDKSRWQQGNVFSCSVMHEALH
NHYTQKSLSLSPGK
Cynomolgus monkey chinese origin CCR8
(SEQ ID NO: 129)
MDYTLDPSMTTMTDYYYPDSLSSPCDGELIQRNDKLLLAVFYCLLFVFSLLGNSLVILVLVVC
KKLRNITDIYLLNLALSDLLFVFSFPFQTYYQLDQWVFGTVMCKVVSGFYYIGFYSSMFFITL
MSVDRYLAVVHAVYAIKVRTIRMGTTLSLVVWLTAIMATIPLLVFYQVASEDGVLQCYSFYNQ
QTLKWKIFTNFEMNILGLLIPFTIFMFCYIKILHQLKRCQNHNKTKAIRLVLIVVIASLLFWV
PFNVVLFLTSLHSMHILDGCSISQQLNYATHVTEIISFTHCCVNPVIYAFVGEKFKKHLSEIF
QKSCSHIFIYLGRQMPRESCEKSSSCQQHSFRSSSIDYIL
Cynomolgus monkey Mauritian origin T4R CCR8
(SEQ ID NO: 130)
MDYRLDPSMTTMTDYYYPDSLSSPCDGELIQRNDKLLLAVFYCLLFVFSLLGNSLVILVLVVC
KKLRNITDIYLLNLALSDLLFVFSFPFQTYYQLDQWVFGTVMCKVVSGFYYIGFYSSMFFITL
MSVDRYLAVVHAVYAIKVRTIRMGTTLSLVVWLTAIMATIPLLVFYQVASEDGVLQCYSFYNQ
QTLKWKIFTNFEMNILGLLIPFTIFMFCYIKILHQLKRCQNHNKTKAIRLVLIVVIASLLFWV
PFNVVLFLTSLHSMHILDGCSISQQLNYATHVTEIISFTHCCVNPVIYAFVGEKFKKHLSEIF
QKSCSHIFIYLGRQMPRESCEKSSSCQQHSFRSSSIDYIL
Human CCR8
(SEQ ID NO: 131)
MDYTLDLSVTTVTDYYYPDIFSSPCDAELIQTNGKLLLAVFYCLLFVFSLLGNSLVILVLVVC
KKLRSITDVYLLNLALSDLLFVFSFPFQTYYLLDQWVFGTVMCKVVSGFYYIGFYSSMFFITL
MSVDRYLAVVHAVYALKVRTIRMGTTLCLAVWLTAIMATIPLLVFYQVASEDGVLQCYSFYNQ
QTLKWKIFTNFKMNILGLLIPFTIFMFCYIKILHQLKRCQNHNKTKAIRLVLIVVIASLLFWV
PFNVVLFLTSLHSMHILDGCSISQQLTYATHVTEIISFTHCCVNPVIYAFVGEKFKKHLSEIF
QKSCSQIFNYLGRQMPRESCEKSSSCQQHSSRSSSVDYIL
Human A27G CCR8
(SEQ ID NO: 132)
[sequence omitted]
CCR8 P_1-35 peptide
(SEQ ID NO: 133)
MDYTLDLSVTTVTDYYYPDIFSSPCDAELIQTNGK
CCR8 P_1-12 peptide
(SEQ ID NO: 134)
MDYTLDLSVTTV
CCR8 P_13-24 peptide
(SEQ ID NO: 135)
TDYYYPDIFSSP
CCR8 P_25-35 peptide
(SEQ ID NO: 136)
CDAELIQTNGK
CCR8 P_7-18 peptide
(SEQ ID NO: 137)
LSVTTVTDYYYP
CCR8 P_19-30 peptide
(SEQ ID NO: 138)
DIFSSPCDAELI
Antibody 20C1.009 LCDR1
(SEQ ID NO: 139)
RASQGISNWLA
Antibody 20C1.009 LCDR2
(SEQ ID NO: 140)
AASSLQS
Antibody 20C1.009 LCDR3
(SEQ ID NO: 141)
QQAESFPHT
Antibody 20C1.009 HCDR1
(SEQ ID NO: 142)
SYDMS
Antibody 20C1.009 HCDR2
(SEQ ID NO: 143)
LISGGGSQTYYAESVKG
Antibody 20C1.009 HCDR3
(SEQ ID NO: 144)
PSGHYFYAMDV
Antibody 20C1.009 VL
(SEQ ID NO: 145)
DIQMTQSPSSVSASVGDRVTITCRASQGISNWLAWYQQKPGKAPKLLIFAASSLQSGVPSRFS
GSGSGTDFTLTISSLQPEDFATYYCQQAESFPHTFGGGTKVEIK
Antibody 20C1.009 VH
(SEQ ID NO: 146)
EVQLLESGGGLVQPGGSLRLSCAASGFTFSSYDMSWVRQAPGKGLEWVSLISGGGSQTYYAES
VKGRFTISRDNSKNTLYLQMNSLRAEDTAVYFCASPSGHYFYAMDVWGQGTTVTVSS
Antibody 20C1.009 LC
(SEQ ID NO: 147)
DIQMTQSPSSVSASVGDRVTITCRASQGISNWLAWYQQKPGKAPKLLIFAASSLQSGVPSRFS
GSGSGTDFTLTISSLQPEDFATYYCQQAESFPHTFGGGTKVEIKRTVAAPSVFIFPPSDEQLK
SGTASVVCLLNNFYPREAKVQWKVDNALQSGNSQESVTEQDSKDSTYSLSSTLTLSKADYEKH
KVYACEVTHQGLSSPVTKSFNRGEC
Antibody 20C1.009 HC
(SEQ ID NO: 148)
EVQLLESGGGLVQPGGSLRLSCAASGFTFSSYDMSWVRQAPGKGLEWVSLISGGGSQTYYAES
VKGRFTISRDNSKNTLYLQMNSLRAEDTAVYFCASPSGHYFYAMDVWGQGTTVTVSSASTKGP
SVFPLAPSSKSTSGGTAALGCLVKDYFPEPVTVSWNSGALTSGVHTFPAVLQSSGLYSLSSVV
TVPSSSLGTQTYICNVNHKPSNTKVDKKVEPKSCDKTHTCPPCPAPELLGGPSVFLFPPKPKD
TLMISRTPEVTCVVVDVSHEDPEVKFNWYVDGVEVHNAKTKPCEEQYGSTYRCVSVLTVLHQD
WLNGKEYKCKVSNKALPAPIEKTISKAKGQPREPQVYTLPPSREEMTKNQVSLTCLVKGFYPS
DIAVEWESNGQPENNYKTTPPVLDSDGSFFLYSKLTVDKSRWQQGNVFSCSVMHEALHNHYTQ
KSLSLSPGK
Antibody 20A2.3 LCDR1
(SEQ ID NO: 149)
SGDKLGDKYAS
Antibody 20A2.3 LCDR2
(SEQ ID NO: 150)
QDRKRPS
Antibody 20A2.3 LCDR3
(SEQ ID NO: 151)
QAFESSTEV
Antibody 20A2.3 HCDR1
(SEQ ID NO: 152)
NYGMH
Antibody 20A2.3 HCDR2
(SEQ ID NO: 153)
LIWYDASKKYYAESVKG
Antibody 20A2.3 HCDR3
(SEQ ID NO: 154)
DPSSLTGSTGYYGMDV
Antibody 20A2.3 VL
(SEQ ID NO: 155)
SYELTQPPSVSVSPGQTASITCSGDKLGDKYASWYQQKPGQSPVLVIYQDRKRPSGIPERFSG
SNSGNTATLTISGTQAMDEADYYCQAFESSTEVFGGGTKLTVL
Antibody 20A2.3 VH
(SEQ ID NO: 156)
QVQLVESGGGVVQPGRSLRLSCAASGFTFSNYGMHWVRQAPGKGLEWVALIWYDASKKYYAES
VKGRFTISRDNSKNTLYLQMNSLRAEDTAAYYCARDPSSLTGSTGYYGMDVWGQGTTVTVSS
Antibody 20A2.3 LC
(SEQ ID NO: 157)
SYELTQPPSVSVSPGQTASITCSGDKLGDKYASWYQQKPGQSPVLVIYQDRKRPSGIPERFSG
SNSGNTATLTISGTQAMDEADYYCQAFESSTEVFGGGTKLTVLGQPKAAPSVTLFPPSSEELQ
ANKATLVCLISDFYPGAVTVAWKADSSPVKAGVETTTPSKQSNNKYAASSYLSLTPEQWKSHR
SYSCQVTHEGSTVEKTVAPTECS
Antibody 20A2.3 HC
(SEQ ID NO: 158)
QVQLVESGGGVVQPGRSLRLSCAASGFTFSNYGMHWVRQAPGKGLEWVALIWYDASKKYYAES
VKGRFTISRDNSKNTLYLQMNSLRAEDTAAYYCARDPSSLTGSTGYYGMDVWGQGTTVTVSSA
STKGPSVFPLAPSSKSTSGGTAALGCLVKDYFPEPVTVSWNSGALTSGVHTFPAVLQSSGLYS
LSSVVTVPSSSLGTQTYICNVNHKPSNTKVDKKVEPKSCDKTHTCPPCPAPELLGGPSVFLFP
PKPKDTLMISRTPEVTCVVVDVSHEDPEVKFNWYVDGVEVHNAKTKPCEEQYGSTYRCVSVLT
VLHQDWLNGKEYKCKVSNKALPAPIEKTISKAKGQPREPQVYTLPPSREEMTKNQVSLTCLVK
GFYPSDIAVEWESNGQPENNYKTTPPVLDSDGSFFLYSKLTVDKSRWQQGNVFSCSVMHEALH
NHYTQKSLSLSPGK
Antibody 20D4.6 LCDR1
(SEQ ID NO: 159)
SGDALPKKYAY
Antibody 20D4.6 LCDR2
(SEQ ID NO: 160)
EDAKRPS
Antibody 20D4.6 LCDR3
(SEQ ID NO: 161)
YSTDASGNHRV
Antibody 20D4.6 HCDR1
(SEQ ID NO: 162)
DYSMS
Antibody 20D4.6 HCDR2
(SEQ ID NO: 163)
GINWNGGRTRYADAVKG
Antibody 20D4.6 HCDR3
(SEQ ID NO: 164)
EFNNFESNWFDP
Antibody 20D4.6 VL
(SEQ ID NO: 165)
SYELTQPPSVSVSPGQTARITCSGDALPKKYAYWYQQKPGQAPVLVISEDAKRPSGIPERFSG
SSSGTMATLTISGAQVEDEADYYCYSTDASGNHRVFGGGTKLTVL
Antibody 20D4.6 VH
(SEQ ID NO: 166)
EVQLVESGGSVVRPGGSLRLSCAASGFTVDDYSMSWVRQVPGKGLEWVSGINWNGGRTRYADA
VKGRFTISRDSAKNSLYLQMNSLRAEDTALYYCAREFNNFESNWFDPWGQGTLVTVSS
Antibody 20D4.6 LC
(SEQ ID NO: 167)
SYELTQPPSVSVSPGQTARITCSGDALPKKYAYWYQQKPGQAPVLVISEDAKRPSGIPERFSG
SSSGTMATLTISGAQVEDEADYYCYSTDASGNHRVFGGGTKLTVLGQPKAAPSVTLFPPSSEE
LQANKATLVCLISDFYPGAVTVAWKADSSPVKAGVETTTPSKQSNNKYAASSYLSLTPEQWKS
HRSYSCQVTHEGSTVEKTVAPTECS
Antibody 20D4.6 HC
(SEQ ID NO: 168)
EVQLVESGGSVVRPGGSLRLSCAASGFTVDDYSMSWVRQVPGKGLEWVSGINWNGGRTRYADA
VKGRFTISRDSAKNSLYLQMNSLRAEDTALYYCAREFNNFESNWFDPWGQGTLVTVSSASTKG
PSVFPLAPSSKSTSGGTAALGCLVKDYFPEPVTVSWNSGALTSGVHTFPAVLQSSGLYSLSSV
VTVPSSSLGTQTYICNVNHKPSNTKVDKKVEPKSCDKTHTCPPCPAPELLGGPSVFLFPPKPK
DTLMISRTPEVTCVVVDVSHEDPEVKFNWYVDGVEVHNAKTKPCEEQYGSTYRCVSVLTVLHQ
DWLNGKEYKCKVSNKALPAPIEKTISKAKGQPREPQVYTLPPSREEMTKNQVSLTCLVKGFYP
SDIAVEWESNGQPENNYKTTPPVLDSDGSFFLYSKLTVDKSRWQQGNVFSCSVMHEALHNHYT
QKSLSLSPGK
Antibody 20D4.17 LCDR1
(SEQ ID NO: 169)
SGDALPKKYAY
Antibody 20D4.17 LCDR2
(SEQ ID NO: 170)
EDAKRPS
Antibody 20D4.17 LCDR3
(SEQ ID NO: 171)
YSTDASGNHRV
Antibody 20D4.17 HCDR1
(SEQ ID NO: 172)
DYSMS
Antibody 20D4.17 HCDR2
(SEQ ID NO: 173)
GINWNAGRTRYADAVKG
Antibody 20D4.17 HCDR3
(SEQ ID NO: 174)
EFNNFESNWFDP
Antibody 20D4.17 VL
(SEQ ID NO: 175)
SYELTQPPSVSVSPGQTARITCSGDALPKKYAYWYQQKPGQAPVLVISEDAKRPSGIPERFSG
SSSGTMATLTISGAQVEDEADYYCYSTDASGNHRVFGGGTKLTVL
Antibody 20D4.17 VH
(SEQ ID NO: 176)
EVQLVESGGSVVRPGGSLRLSCAASGFTVDDYSMSWVRQVPGKGLEWVSGINWNAGRTRYADA
VKGRFTISRDSAKNSLYLQMNSLRAEDTALYYCAREFNNFESNWFDPWGQGTLVTVSS
Antibody 20D4.17 LC
(SEQ ID NO: 177)
SYELTQPPSVSVSPGQTARITCSGDALPKKYAYWYQQKPGQAPVLVISEDAKRPSGIPERFSG
SSSGTMATLTISGAQVEDEADYYCYSTDASGNHRVFGGGTKLTVLGQPKAAPSVTLFPPSSEE
LQANKATLVCLISDFYPGAVTVAWKADSSPVKAGVETTTPSKQSNNKYAASSYLSLTPEQWKS
HRSYSCQVTHEGSTVEKTVAPTECS
Antibody 20D4.17 HC
(SEQ ID NO: 178)
EVQLVESGGSVVRPGGSLRLSCAASGFTVDDYSMSWVRQVPGKGLEWVSGINWNAGRTRYADA
VKGRFTISRDSAKNSLYLQMNSLRAEDTALYYCAREFNNFESNWFDPWGQGTLVTVSSASTKG
PSVFPLAPSSKSTSGGTAALGCLVKDYFPEPVTVSWNSGALTSGVHTFPAVLQSSGLYSLSSV
VTVPSSSLGTQTYICNVNHKPSNTKVDKKVEPKSCDKTHTCPPCPAPELLGGPSVFLFPPKPK
DTLMISRTPEVTCVVVDVSHEDPEVKFNWYVDGVEVHNAKTKPCEEQYGSTYRCVSVLTVLHQ
DWLNGKEYKCKVSNKALPAPIEKTISKAKGQPREPQVYTLPPSREEMTKNQVSLTCLVKGFYP
SDIAVEWESNGQPENNYKTTPPVLDSDGSFFLYSKLTVDKSRWQQGNVFSCSVMHEALHNHYT
QKSLSLSPGK
Antibody 20C1.006 LCDR1
(SEQ ID NO: 179)
RASQGISNWLA
Antibody 20C1.006 LCDR2
(SEQ ID NO: 180)
AASSLQS
Antibody 20C1.006 LCDR3
(SEQ ID NO: 181)
QQAESFPHT
Antibody 20C1.006 HCDR1
(SEQ ID NO: 182)
SYDMS
Antibody 20C1.006 HCDR2
(SEQ ID NO: 183)
LISGGGSNTYYAESVKG
Antibody 20C1.006 HCDR3
(SEQ ID NO: 184)
PSGHYFYAMDV
Antibody 20C1.006 VL
(SEQ ID NO: 185)
DIQMTQSPSSVSASVGDRVTITCRASQGISNWLAWYQQKPGKAPKLLIFAASSLQSGVPSRFS
GSGSGTDFTLTISSLQPEDFATYYCQQAESFPHTFGGGTKVEIK
Antibody 20C1.006 VH
(SEQ ID NO: 186)
EVQLLESGGGLVQPGGSLRLSCAASGFTFSSYDMSWVRQAPGKGLEWVSLISGGGSNTYYAES
VKGRFTISRDNSKNTLYLQMNSLRAEDTAVYFCASPSGHYFYAMDVWGQGTTVTVSS
Antibody 20C1.006 LC
(SEQ ID NO: 187)
DIQMTQSPSSVSASVGDRVTITCRASQGISNWLAWYQQKPGKAPKLLIFAASSLQSGVPSRFS
GSGSGTDFTLTISSLQPEDFATYYCQQAESFPHTFGGGTKVEIKRTVAAPSVFIFPPSDEQLK
SGTASVVCLLNNFYPREAKVQWKVDNALQSGNSQESVTEQDSKDSTYSLSSTLTLSKADYEKH
KVYACEVTHQGLSSPVTKSFNRGEC
Antibody 20C1.006 HC
(SEQ ID NO: 188)
EVQLLESGGGLVQPGGSLRLSCAASGFTFSSYDMSWVRQAPGKGLEWVSLISGGGSNTYYAES
VKGRFTISRDNSKNTLYLQMNSLRAEDTAVYFCASPSGHYFYAMDVWGQGTTVTVSSASTKGP
SVFPLAPSSKSTSGGTAALGCLVKDYFPEPVTVSWNSGALTSGVHTFPAVLQSSGLYSLSSVV
TVPSSSLGTQTYICNVNHKPSNTKVDKKVEPKSCDKTHTCPPCPAPELLGGPSVFLFPPKPKD
TLMISRTPEVTCVVVDVSHEDPEVKFNWYVDGVEVHNAKTKPCEEQYGSTYRCVSVLTVLHQD
WLNGKEYKCKVSNKALPAPIEKTISKAKGQPREPQVYTLPPSREEMTKNQVSLTCLVKGFYPS
DIAVEWESNGQPENNYKTTPPVLDSDGSFFLYSKLTVDKSRWQQGNVFSCSVMHEALHNHYTQ
KSLSLSPGK
G4S linker
(SEQ ID NO: 189)
GGGGS
(G4S)4 linker
(SEQ ID NO: 190)
GGGGSGGGGSGGGGSGGGGS
I2C - HCDR1
(SEQ ID NO: 191)
KYAMN
I2C - HCDR2
(SEQ ID NO: 192)
RIRSKYNNYATYYADSVKD
I2C - HCDR3
(SEQ ID NO: 193)
HGNFGNSYISYWAY
I2C - LCDR1
(SEQ ID NO: 194)
GSSTGAVTSGNYPN
I2C - LCDR2
(SEQ ID NO: 195)
GTKFLAP
I2C - LCDR3
(SEQ ID NO: 196)
VLWYSNRWV
I2C - VH
(SEQ ID NO: 197)
EVQLVESGGGLVQPGGSLKLSCAASGFTFNKYAMNWVRQAPGKGLEWVARIRSKYNNYATYYA
DSVKDRFTISRDDSKNTAYLQMNNLKTEDTAVYYCVRHGNFGNSYISYWAYWGQGTLVTVSS
I2C - VL
(SEQ ID NO: 198)
QTVVTQEPSLTVSPGGTVTLTCGSSTGAVTSGNYPNWVQQKPGQAPRGLIGGTKFLAPGTPAR
FSGSLLGGKAALTLSGVQPEDEAEYYCVLWYSNRWVFGGGTKLTVL
I2E - HCDR1
(SEQ ID NO: 199)
KYAIN
I2E - HCDR2
(SEQ ID NO: 200)
RIRSKYNNYATYYADAVKD
I2E - HCDR3
(SEQ ID NO: 201)
AGNFGSSYISYWAY
I2E - LCDR1
(SEQ ID NO: 202)
GSSTGAVTSGNYPN
I2E - LCDR2
(SEQ ID NO: 203)
GTKFLAP
I2E - LCDR3
(SEQ ID NO: 204)
VLWYSNRWV
I2E - VH
(SEQ ID NO: 205)
EVQLVESGGGLVQPGGSLKLSCAASGFTFNKYAINWVRQAPGKGLEWVARIRSKYNNYATYYA
DAVKDRFTISRDDSKNTVYLQMNNLKTEDTAVYYCARAGNFGSSYISYWAYWGQGTLVTVSS
I2E - VL
(SEQ ID NO: 206)
QTVVTQEPSLTVSPGGTVTITCGSSTGAVTSGNYPNWVQKKPGQAPRGLIGGTKFLAPGTPAR
FSGSLSGGKAALTLSGVQPEDEAEYYCVLWYSNRWVFGSGTKLTVL
G4Q Linker
(SEQ ID NO: 207)
GGGGQ
(G4Q)4 Linker
(SEQ ID NO: 208)
GGGGQGGGGQGGGGQGGGGQ
mCCR8
(SEQ ID NO: 209)
MDYTMEPNVTMTDYYPDFFTAPCDAEFLLRGSMLYLAILYCVLFVLGLLGNSLVILVLVGCKK
LRSITDIYLLNLAASDLLFVLSIPFQTHNLLDQWVFGTAMCKVVSGLYYIGFFSSMFFITLMS
VDRYLAIVHAVYAIKVRTASVGTALSLTVWLAAVTATIPLMVFYQVASEDGMLQCFQFYEEQS
LRWKLFTHFEINALGLLLPFAILLFCYVRILQQLRGCLNHNRTRAIKLVLTVVIVSLLFWVPF
NVALFLTSLHDLHILDGCATRQRLALAIHVTEVISFTHCCVNPVIYAFIGEKFKKHLMDVFQK
SCSHIFLYLGRQMPVGALERQLSSNQRSSHSSTLDDIL
Rat CCR8
(SEQ ID NO: 210)
MDYTLEPNVTMTDYYPDFFTTPCDTELLLRGGTLYLAVLYCILFVLGLLGNSLVILVLVACKK
LRSITDVYLLNLAASDLLFVLSIPFQTHNLLDQWVFGTVMCKVVSGLYYIGFFSSMLFITLMS
VDRYLAVVHPVHAIKVRTARVGTALSLAVWLAAIAATVPLMVFYQVSSEDGMLQCFQLYDEQS
LRWKLFTHFEVNALGLLLPFAILLFCYVRILQQLRGCLNHNRTRAIKLVLTIVVVSLLFWVPF
NVVLFLTSLHDMHILEGCATRQRLALATHVTEVISFMHCCVNPVIYAFIGEKFKKHLVDVFQK
SCSHIFLYVGRQMPVGALERQLSSNQRSSHSSTLDYIL
hCCR4
(SEQ ID NO: 211)
MNPTDIADTTLDESIYSNYYLYESIPKPCTKEGIKAFGELFLPPLYSLVFVFGLLGNSVVVLV
LFKYKRLRSMTDVYLLNLAISDLLFVFSLPFWGYYAADQWVFGLGLCKMISWMYLVGFYSGIF
FVMLMSIDRYLAIVHAVFSLRARTLTYGVITSLATWSVAVFASLPGFLFSTCYTERNHTYCKT
KYSLNSTTWKVLSSLEINILGLVIPLGIMLFCYSMIIRTLQHCKNEKKNKAVKMIFAVVVLFL
GFWTPYNIVLFLETLVELEVLQDCTFERYLDYAIQATETLAFVHCCLNPIIYFFLGEKFRKYI
LQLFKTCRGLFVLCQYCGLLQIYSADTPSSSYTQSTMDHDLHDAL
Antibody 20C1.009 HC without C-terminal lysine
(SEQ ID NO: 212)
EVQLLESGGGLVQPGGSLRLSCAASGFTFSSYDMSWVRQAPGKGLEWVSLISGGGSQTYYAES
VKGRFTISRDNSKNTLYLQMNSLRAEDTAVYFCASPSGHYFYAMDVWGQGTTVTVSSASTKGP
SVFPLAPSSKSTSGGTAALGCLVKDYFPEPVTVSWNSGALTSGVHTFPAVLQSSGLYSLSSVV
TVPSSSLGTQTYICNVNHKPSNTKVDKKVEPKSCDKTHTCPPCPAPELLGGPSVFLFPPKPKD
TLMISRTPEVTCVVVDVSHEDPEVKFNWYVDGVEVHNAKTKPCEEQYGSTYRCVSVLTVLHQD
WLNGKEYKCKVSNKALPAPIEKTISKAKGQPREPQVYTLPPSREEMTKNQVSLTCLVKGFYPS
DIAVEWESNGQPENNYKTTPPVLDSDGSFFLYSKLTVDKSRWQQGNVFSCSVMHEALHNHYTQ
KSLSLSPG
Leader sequence
(SEQ ID NO: 213)
MDMRVPAQLL GLLLLWLRGA RC
DNA encoding leader sequence of SEQ ID NO: 213
(SEQ ID NO: 214)
atggacatga gagtgcctgc acagctgctg ggcctgctgc tgctgtggct
gagaggcgcc agatgc.
Leader sequence
(SEQ ID NO: 215)
MAWALLLLTL LTQGTGSWA
DNA encoding leader sequence of SEQ ID NO: 215
(SEQ ID NO: 216)
atggcctggg ctctgctgct cctcaccctc ctcactcagg gcacagggtc
ctgggcc

TABLE 24
TCE molecule sequences.

| | | |
|---|---|---|
| SEQ ID | | |
| NO: | Designation | Sequence |

CCR8 TCE 1.1 (CC EI GQ x I2E GQ x scFcmod delGK)

| | | |
|---|---|---|
| 217 | HCDR1 | NARMG |
| 218 | HCDR2 | RIKSKTEGGTRDYAAPVKG |
| 219 | HCDR3 | YSGV |
| 220 | LCDR1 | KSSQSVLYSSNNKNYLA |
| 221 | LCDR2 | WASTRES |
| 222 | LCDR3 | QQYYSIPIT |
| 223 | VH | EVQLVESGGGLVKPGGSLRLSCAASGFTFSNARMGWVRQA |
| | | PGKCLEWVGRIKSKTEGGTRDYAAPVKGRFTISRDDSKNT |
| | | LYLQMNSLKTEDTAVYYCTSYSGVWGQGTMVTVSS |
| 224 | VL | EIVMTQSPDSLAVSLGERATINCKSSQSVLYSSNNKNYLA |
| | | WYHQKPGQSPKLLISWASTRESGVPDRFSGSGSGTDFTLT |
| | | INSLQAEDVAVYYCQQYYSIPITFGCGTKVEIK |
| 225 | SCFV | EVQLVESGGGLVKPGGSLRLSCAASGFTFSNARMGWVRQA |
| | | PGKCLEWVGRIKSKTEGGTRDYAAPVKGRFTISRDDSKNT |
| | | LYLQMNSLKTEDTAVYYCTSYSGVWGQGTMVTVSSGGGGQ |
| | | GGGGQGGGGQEIVMTQSPDSLAVSLGERATINCKSSQSVL |
| | | YSSNNKNYLAWYHQKPGQSPKLLISWASTRESGVPDRFSG |
| | | SGSGTDFTLTINSLQAEDVAVYYCQQYYSIPITFGCGTKV |
| | | EIK |
| 226 | TCE 1.1 | EVQLVESGGGLVKPGGSLRLSCAASGFTFSNARMGWVRQA |
| | | PGKCLEWVGRIKSKTEGGTRDYAAPVKGRFTISRDDSKNT |
| | | LYLQMNSLKTEDTAVYYCTSYSGVWGQGTMVTVSSGGGGQ |
| | | GGGGQGGGGQEIVMTQSPDSLAVSLGERATINCKSSQSVL |
| | | YSSNNKNYLAWYHQKPGQSPKLLISWASTRESGVPDRFSG |
| | | SGSGTDFTLTINSLQAEDVAVYYCQQYYSIPITFGCGTKV |
| | | EIKSGGGGQEVQLVESGGGLVQPGGSLKLSCAASGFTFNK |
| | | YAINWVRQAPGKGLEWVARIRSKYNNYATYYADAVKDRFT |
| | | ISRDDSKNTVYLQMNNLKTEDTAVYYCARAGNFGSSYISY |
| | | WAYWGQGTLVTVSSGGGGQGGGGQGGGGQQTVVTQEPSLT |
| | | VSPGGTVTITCGSSTGAVTSGNYPNWVQKKPGQAPRGLIG |
| | | GTKFLAPGTPARFSGSLSGGKAALTLSGVQPEDEAEYYCV |
| | | LWYSNRWVFGSGTKLTVL |
| 227 | TCE 1.1 HLE | EVQLVESGGGLVKPGGSLRLSCAASGFTFSNARMGWVRQA |
| | | PGKCLEWVGRIKSKTEGGTRDYAAPVKGRFTISRDDSKNT |
| | | LYLQMNSLKTEDTAVYYCTSYSGVWGQGTMVTVSSGGGGQ |
| | | GGGGQGGGGQEIVMTQSPDSLAVSLGERATINCKSSQSVL |
| | | YSSNNKNYLAWYHQKPGQSPKLLISWASTRESGVPDRFSG |
| | | SGSGTDFTLTINSLQAEDVAVYYCQQYYSIPITFGCGTKV |
| | | EIKSGGGGQEVQLVESGGGLVQPGGSLKLSCAASGFTFNK |
| | | YAINWVRQAPGKGLEWVARIRSKYNNYATYYADAVKDRFT |
| | | ISRDDSKNTVYLQMNNLKTEDTAVYYCARAGNFGSSYISY |
| | | WAYWGQGTLVTVSSGGGGQGGGGQGGGGQQTVVTQEPSLT |
| | | VSPGGTVTITCGSSTGAVTSGNYPNWVQKKPGQAPRGLIG |
| | | GTKFLAPGTPARFSGSLSGGKAALTLSGVQPEDEAEYYCV |
| | | LWYSNRWVFGSGTKLTVLGGGGCPPCPAPELLGGPSVFLF |
| | | PPKPKDTLMISRTPEVTCVVVDVSHEEPEVKFNWYVDGVE |
| | | VHNAKTKPCEEQYGSTYRCVSVLTVLHQDWLNGKEYKCKV |
| | | SNKALPAPIEKTISKAKGQPREPQVYTLPPSREEMTKNQV |
| | | SLTCLVKGFYPSDIAVEWESNGQPENNYKTTPPVLDSDGS |
| | | FFLYSKLTVDKSRWQQGNVFSCSVMHEALHNHYTQKSLSL |
| | | SPGGGGQGGGGQGGGGQGGGGQGGGGQGGGGQCPPCPAPE |
| | | LLGGPSVFLFPPKPKDTLMISRTPEVTCVVVDVSHEEPEV |
| | | KFNWYVDGVEVHNAKTKPCEEQYGSTYRCVSVLTVLHQDW |
| | | LNGKEYKCKVSNKALPAPIEKTISKAKGQPREPQVYTLPP |
| | | SREEMTKNQVSLTCLVKGFYPSDIAVEWESNGQPENNYKT |
| | | TPPVLDSDGSFFLYSKLTVDKSRWQQGNVFSCSVMHEALH |
| | | NHYTQKSLSLSPGK |

CCR8 TCE 1.2 (CC EI GQ x I2E GQ x scFcmod delGK_YTE)

| | | |
|---|---|---|
| 228 | HCDR1 | NARMG |
| 229 | HCDR2 | RIKSKTEGGTRDYAAPVKG |
| 230 | HCDR3 | YSGV |
| 231 | LCDR1 | KSSQSVLYSSNNKNYLA |
| 232 | LCDR2 | WASTRES |
| 233 | LCDR3 | QQYYSIPIT |
| 234 | VH | EVQLVESGGGLVKPGGSLRLSCAASGFTFSNARMGWVRQA |
| | | PGKCLEWVGRIKSKTEGGTRDYAAPVKGRFTISRDDSKNT |
| | | LYLQMNSLKTEDTAVYYCTSYSGVWGQGTMVTVSS |
| 235 | VL | EIVMTQSPDSLAVSLGERATINCKSSQSVLYSSNNKNYLA |
| | | WYHQKPGQSPKLLISWASTRESGVPDRFSGSGSGTDFTLT |
| | | INSLQAEDVAVYYCQQYYSIPITFGCGTKVEIK |
| 236 | SCFV | EVQLVESGGGLVKPGGSLRLSCAASGFTFSNARMGWVRQA |
| | | PGKCLEWVGRIKSKTEGGTRDYAAPVKGRFTISRDDSKNT |
| | | LYLQMNSLKTEDTAVYYCTSYSGVWGQGTMVTVSSGGGGQ |
| | | GGGGQGGGGQEIVMTQSPDSLAVSLGERATINCKSSQSVL |
| | | YSSNNKNYLAWYHQKPGQSPKLLISWASTRESGVPDRFSG |
| | | SGSGTDFTLTINSLQAEDVAVYYCQQYYSIPITFGCGTKV |
| | | EIK |
| 237 | TCE 1.2 | EVQLVESGGGLVKPGGSLRLSCAASGFTFSNARMGWVRQA |
| | | PGKCLEWVGRIKSKTEGGTRDYAAPVKGRFTISRDDSKNT |
| | | LYLQMNSLKTEDTAVYYCTSYSGVWGQGTMVTVSSGGGGQ |
| | | GGGGQGGGGQEIVMTQSPDSLAVSLGERATINCKSSQSVL |
| | | YSSNNKNYLAWYHQKPGQSPKLLISWASTRESGVPDRFSG |
| | | SGSGTDFTLTINSLQAEDVAVYYCQQYYSIPITFGCGTKV |
| | | EIKSGGGGQEVQLVESGGGLVQPGGSLKLSCAASGFTFNK |
| | | YAINWVRQAPGKGLEWVARIRSKYNNYATYYADAVKDRFT |
| | | ISRDDSKNTVYLQMNNLKTEDTAVYYCARAGNFGSSYISY |
| | | WAYWGQGTLVTVSSGGGGQGGGGQGGGGQQTVVTQEPSLT |
| | | VSPGGTVTITCGSSTGAVTSGNYPNWVQKKPGQAPRGLIG |
| | | GTKFLAPGTPARFSGSLSGGKAALTLSGVQPEDEAEYYCV |
| | | LWYSNRWVFGSGTKLTVL |
| 238 | TCE 1.2 HLE | EVQLVESGGGLVKPGGSLRLSCAASGFTFSNARMGWVRQA |
| | | PGKCLEWVGRIKSKTEGGTRDYAAPVKGRFTISRDDSKNT |
| | | LYLQMNSLKTEDTAVYYCTSYSGVWGQGTMVTVSSGGGGQ |
| | | GGGGQGGGGQEIVMTQSPDSLAVSLGERATINCKSSQSVL |
| | | YSSNNKNYLAWYHQKPGQSPKLLISWASTRESGVPDRFSG |
| | | SGSGTDFTLTINSLQAEDVAVYYCQQYYSIPITFGCGTKV |
| | | EIKSGGGGQEVQLVESGGGLVQPGGSLKLSCAASGFTFNK |
| | | YAINWVRQAPGKGLEWVARIRSKYNNYATYYADAVKDRFT |
| | | ISRDDSKNTVYLQMNNLKTEDTAVYYCARAGNFGSSYISY |
| | | WAYWGQGTLVTVSSGGGGQGGGGQGGGGQQTVVTQEPSLT |
| | | VSPGGTVTITCGSSTGAVTSGNYPNWVQKKPGQAPRGLIG |
| | | GTKFLAPGTPARFSGSLSGGKAALTLSGVQPEDEAEYYCV |
| | | LWYSNRWVFGSGTKLTVLGGGGCPPCPAPELLGGPSVFLF |
| | | PPKPKDTLYITREPEVTCVVVDVSHEEPEVKFNWYVDGVE |
| | | VHNAKTKPCEEQYGSTYRCVSVLTVLHQDWLNGKEYKCKV |
| | | SNKALPAPIEKTISKAKGQPREPQVYTLPPSREEMTKNQV |
| | | SLTCLVKGFYPSDIAVEWESNGQPENNYKTTPPVLDSDGS |
| | | FFLYSKLTVDKSRWQQGNVFSCSVMHEALHNHYTQKSLSL |
| | | SPGGGGQGGGGQGGGGQGGGGQGGGGQGGGGQCPPCPAPE |
| | | LLGGPSVFLFPPKPKDTLYITREPEVTCVVVDVSHEEPEV |
| | | KFNWYVDGVEVHNAKTKPCEEQYGSTYRCVSVLTVLHQDW |
| | | LNGKEYKCKVSNKALPAPIEKTISKAKGQPREPQVYTLPP |
| | | SREEMTKNQVSLTCLVKGFYPSDIAVEWESNGQPENNYKT |
| | | TPPVLDSDGSFFLYSKLTVDKSRWQQGNVFSCSVMHEALH |
| | | NHYTQKSLSLSPGK |

CCR8 TCE 1.3 (EI scFab x I2E GQ x scFcmod delGK_YTE)

| | | |
|---|---|---|
| 239 | HCDR1 | NARMG |
| 240 | HCDR2 | RIKSKTEGGTRDYAAPVKG |
| 241 | HCDR3 | YSGV |
| 242 | LCDR1 | KSSQSVLYSSNNKNYLA |
| 243 | LCDR2 | WASTRES |
| 244 | LCDR3 | QQYYSIPIT |
| 245 | VH-CH1 | EVQLVESGGGLVKPGGSLRLSCAASGFTFSNARMGWVRQA |
| | | PGKGLEWVGRIKSKTEGGTRDYAAPVKGRFTISRDDSKNT |
| | | LYLQMNSLKTEDTAVYYCTSYSGVWGQGTMVTVSSASTKG |
| | | PSVFPLAPSSKSTSGGTAALGCLVKDYFPEPVTVSWNSGA |
| | | LTSGVHTFPAVLQSSGLYSLSSVVTVPSSSLGTQTYICNV |
| | | NHKPSNTKVDKKVEPKSC |
| 246 | VL-Ck | EIVMTQSPDSLAVSLGERATINCKSSQSVLYSSNNKNYLA |
| | | WYHQKPGQSPKLLISWASTRESGVPDRFSGSGSGTDFTLT |
| | | INSLQAEDVAVYYCQQYYSIPITFGGGTKVEIKRTVAAPS |
| | | VFIFPPSDEQLKSGTASVVCLLNNFYPREAKVQWKVDNAL |
| | | QSGNSQESVTEQDSKDSTYSLSSTLTLSKADYEKHKVYAC |
| | | EVTHQGLSSPVTKSFNRGEC |
| 247 | SCFAB | EVQLVESGGGLVKPGGSLRLSCAASGFTFSNARMGWVRQA |
| | | PGKGLEWVGRIKSKTEGGTRDYAAPVKGRFTISRDDSKNT |
| | | LYLQMNSLKTEDTAVYYCTSYSGVWGQGTMVTVSSASTKG |
| | | PSVFPLAPSSKSTSGGTAALGCLVKDYFPEPVTVSWNSGA |
| | | LTSGVHTFPAVLQSSGLYSLSSVVTVPSSSLGTQTYICNV |
| | | NHKPSNTKVDKKVEPKSCGGGGQGGGGQGGGGQGGGGQGG |
| | | GGQGGGGQGGGGQGGGGQEIVMTQSPDSLAVSLGERATIN |
| | | CKSSQSVLYSSNNKNYLAWYHQKPGQSPKLLISWASTRES |
| | | GVPDRFSGSGSGTDFTLTINSLQAEDVAVYYCQQYYSIPI |
| | | TFGGGTKVEIKRTVAAPSVFIFPPSDEQLKSGTASVVCLL |
| | | NNFYPREAKVQWKVDNALQSGNSQESVTEQDSKDSTYSLS |
| | | STLTLSKADYEKHKVYACEVTHQGLSSPVTKSFNRGEC |
| 248 | TCE 1.3 | EVQLVESGGGLVKPGGSLRLSCAASGFTFSNARMGWVRQA |
| | | PGKGLEWVGRIKSKTEGGTRDYAAPVKGRFTISRDDSKNT |
| | | LYLQMNSLKTEDTAVYYCTSYSGVWGQGTMVTVSSASTKG |
| | | PSVFPLAPSSKSTSGGTAALGCLVKDYFPEPVTVSWNSGA |
| | | LTSGVHTFPAVLQSSGLYSLSSVVTVPSSSLGTQTYICNV |
| | | NHKPSNTKVDKKVEPKSCGGGGQGGGGQGGGGQGGGGQGG |
| | | GGQGGGGQGGGGQGGGGQEIVMTQSPDSLAVSLGERATIN |
| | | CKSSQSVLYSSNNKNYLAWYHQKPGQSPKLLISWASTRES |
| | | GVPDRFSGSGSGTDFTLTINSLQAEDVAVYYCQQYYSIPI |
| | | TFGGGTKVEIKRTVAAPSVFIFPPSDEQLKSGTASVVCLL |
| | | NNFYPREAKVQWKVDNALQSGNSQESVTEQDSKDSTYSLS |
| | | STLTLSKADYEKHKVYACEVTHQGLSSPVTKSFNRGECSG |
| | | GGGQEVQLVESGGGLVQPGGSLKLSCAASGFTFNKYAINW |
| | | VRQAPGKGLEWVARIRSKYNNYATYYADAVKDRFTISRDD |
| | | SKNTVYLQMNNLKTEDTAVYYCARAGNFGSSYISYWAYWG |
| | | QGTLVTVSSGGGGQGGGGQGGGGQQTVVTQEPSLTVSPGG |
| | | TVTITCGSSTGAVTSGNYPNWVQKKPGQAPRGLIGGTKFL |
| | | APGTPARFSGSLSGGKAALTLSGVQPEDEAEYYCVLWYSN |
| | | RWVFGSGTKLTVL |
| 249 | TCE 1.3 HLE | EVQLVESGGGLVKPGGSLRLSCAASGFTFSNARMGWVRQA |
| | | PGKGLEWVGRIKSKTEGGTRDYAAPVKGRFTISRDDSKNT |
| | | LYLQMNSLKTEDTAVYYCTSYSGVWGQGTMVTVSSASTKG |
| | | PSVFPLAPSSKSTSGGTAALGCLVKDYFPEPVTVSWNSGA |
| | | LTSGVHTFPAVLQSSGLYSLSSVVTVPSSSLGTQTYICNV |
| | | NHKPSNTKVDKKVEPKSCGGGGQGGGGQGGGGQGGGGQGG |
| | | GGQGGGGQGGGGQGGGGQEIVMTQSPDSLAVSLGERATIN |
| | | CKSSQSVLYSSNNKNYLAWYHQKPGQSPKLLISWASTRES |
| | | GVPDRFSGSGSGTDFTLTINSLQAEDVAVYYCQQYYSIPI |
| | | TFGGGTKVEIKRTVAAPSVFIFPPSDEQLKSGTASVVCLL |
| | | NNFYPREAKVQWKVDNALQSGNSQESVTEQDSKDSTYSLS |
| | | STLTLSKADYEKHKVYACEVTHQGLSSPVTKSFNRGECSG |
| | | GGGQEVQLVESGGGLVQPGGSLKLSCAASGFTFNKYAINW |
| | | VRQAPGKGLEWVARIRSKYNNYATYYADAVKDRFTISRDD |
| | | SKNTVYLQMNNLKTEDTAVYYCARAGNFGSSYISYWAYWG |
| | | QGTLVTVSSGGGGQGGGGQGGGGQQTVVTQEPSLTVSPGG |
| | | TVTITCGSSTGAVTSGNYPNWVQKKPGQAPRGLIGGTKFL |
| | | APGTPARFSGSLSGGKAALTLSGVQPEDEAEYYCVLWYSN |
| | | RWVFGSGTKLTVLGGGGCPPCPAPELLGGPSVFLFPPKPK |
| | | DTLYITREPEVTCVVVDVSHEEPEVKFNWYVDGVEVHNAK |
| | | TKPCEEQYGSTYRCVSVLTVLHQDWLNGKEYKCKVSNKAL |
| | | PAPIEKTISKAKGQPREPQVYTLPPSREEMTKNQVSLTCL |
| | | VKGFYPSDIAVEWESNGQPENNYKTTPPVLDSDGSFFLYS |
| | | KLTVDKSRWQQGNVFSCSVMHEALHNHYTQKSLSLSPGGG |
| | | GQGGGGQGGGGQGGGGQGGGGQGGGGQCPPCPAPELLGGP |
| | | SVFLFPPKPKDTLYITREPEVTCVVVDVSHEEPEVKFNWY |
| | | VDGVEVHNAKTKPCEEQYGSTYRCVSVLTVLHQDWLNGKE |
| | | YKCKVSNKALPAPIEKTISKAKGQPREPQVYTLPPSREEM |
| | | TKNQVSLTCLVKGFYPSDIAVEWESNGQPENNYKTTPPVL |
| | | DSDGSFFLYSKLTVDKSRWQQGNVFSCSVMHEALHNHYTQ |
| | | KSLSLSPGK |

CCR8 TCE 1.4 (EI scFab x I2E GQ x scFcmod delGK)

| | | |
|---|---|---|
| 250 | HCDR1 | NARMG |
| 251 | HCDR2 | RIKSKTEGGTRDYAAPVKG |
| 252 | HCDR3 | YSGV |
| 253 | LCDR1 | KSSQSVLYSSNNKNYLA |
| 254 | LCDR2 | WASTRES |
| 255 | LCDR3 | QQYYSIPIT |
| 256 | VH-CH1 | EVQLVESGGGLVKPGGSLRLSCAASGFTFSNARMGWVRQA |
| | | PGKGLEWVGRIKSKTEGGTRDYAAPVKGRFTISRDDSKNT |
| | | LYLQMNSLKTEDTAVYYCTSYSGVWGQGTMVTVSSASTKG |
| | | PSVFPLAPSSKSTSGGTAALGCLVKDYFPEPVTVSWNSGA |
| | | LTSGVHTFPAVLQSSGLYSLSSVVTVPSSSLGTQTYICNV |
| | | NHKPSNTKVDKKVEPKSC |
| 257 | VL-Ck | EIVMTQSPDSLAVSLGERATINCKSSQSVLYSSNNKNYLA |
| | | WYHQKPGQSPKLLISWASTRESGVPDRFSGSGSGTDFTLT |
| | | INSLQAEDVAVYYCQQYYSIPITFGGGTKVEIKRTVAAPS |
| | | VFIFPPSDEQLKSGTASVVCLLNNFYPREAKVQWKVDNAL |
| | | QSGNSQESVTEQDSKDSTYSLSSTLTLSKADYEKHKVYAC |
| | | EVTHQGLSSPVTKSFNRGEC |
| 258 | SCFAB | EVQLVESGGGLVKPGGSLRLSCAASGFTFSNARMGWVRQA |
| | | PGKGLEWVGRIKSKTEGGTRDYAAPVKGRFTISRDDSKNT |
| | | LYLQMNSLKTEDTAVYYCTSYSGVWGQGTMVTVSSASTKG |
| | | PSVFPLAPSSKSTSGGTAALGCLVKDYFPEPVTVSWNSGA |
| | | LTSGVHTFPAVLQSSGLYSLSSVVTVPSSSLGTQTYICNV |
| | | NHKPSNTKVDKKVEPKSCGGGGQGGGGQGGGGQGGGGQGG |
| | | GGQGGGGQGGGGQGGGGQEIVMTQSPDSLAVSLGERATIN |
| | | CKSSQSVLYSSNNKNYLAWYHQKPGQSPKLLISWASTRES |
| | | GVPDRFSGSGSGTDFTLTINSLQAEDVAVYYCQQYYSIPI |
| | | TFGGGTKVEIKRTVAAPSVFIFPPSDEQLKSGTASVVCLL |
| | | NNFYPREAKVQWKVDNALQSGNSQESVTEQDSKDSTYSLS |
| | | STLTLSKADYEKHKVYACEVTHQGLSSPVTKSFNRGEC |
| 259 | TCE 1.4 | EVQLVESGGGLVKPGGSLRLSCAASGFTFSNARMGWVRQA |
| | | PGKGLEWVGRIKSKTEGGTRDYAAPVKGRFTISRDDSKNT |
| | | LYLQMNSLKTEDTAVYYCTSYSGVWGQGTMVTVSSASTKG |
| | | PSVFPLAPSSKSTSGGTAALGCLVKDYFPEPVTVSWNSGA |
| | | LTSGVHTFPAVLQSSGLYSLSSVVTVPSSSLGTQTYICNV |
| | | NHKPSNTKVDKKVEPKSCGGGGQGGGGQGGGGQGGGGQGG |
| | | GGQGGGGQGGGGQGGGGQEIVMTQSPDSLAVSLGERATIN |
| | | CKSSQSVLYSSNNKNYLAWYHQKPGQSPKLLISWASTRES |
| | | GVPDRFSGSGSGTDFTLTINSLQAEDVAVYYCQQYYSIPI |
| | | TFGGGTKVEIKRTVAAPSVFIFPPSDEQLKSGTASVVCLL |
| | | NNFYPREAKVQWKVDNALQSGNSQESVTEQDSKDSTYSLS |
| | | STLTLSKADYEKHKVYACEVTHQGLSSPVTKSFNRGECSG |
| | | GGGQEVQLVESGGGLVQPGGSLKLSCAASGFTFNKYAINW |
| | | VRQAPGKGLEWVARIRSKYNNYATYYADAVKDRFTISRDD |
| | | SKNTVYLQMNNLKTEDTAVYYCARAGNFGSSYISYWAYWG |
| | | QGTLVTVSSGGGGQGGGGQGGGGQQTVVTQEPSLTVSPGG |
| | | TVTITCGSSTGAVTSGNYPNWVQKKPGQAPRGLIGGTKFL |
| | | APGTPARFSGSLSGGKAALTLSGVQPEDEAEYYCVLWYSN |
| | | RWVFGSGTKLTVL |
| 260 | TCE 1.4 HLE | EVQLVESGGGLVKPGGSLRLSCAASGFTFSNARMGWVRQA |
| | | PGKGLEWVGRIKSKTEGGTRDYAAPVKGRFTISRDDSKNT |
| | | LYLQMNSLKTEDTAVYYCTSYSGVWGQGTMVTVSSASTKG |
| | | PSVFPLAPSSKSTSGGTAALGCLVKDYFPEPVTVSWNSGA |
| | | LTSGVHTFPAVLQSSGLYSLSSVVTVPSSSLGTQTYICNV |
| | | NHKPSNTKVDKKVEPKSCGGGGQGGGGQGGGGQGGGGQGG |
| | | GGQGGGGQGGGGQGGGGQEIVMTQSPDSLAVSLGERATIN |
| | | CKSSQSVLYSSNNKNYLAWYHQKPGQSPKLLISWASTRES |
| | | GVPDRFSGSGSGTDFTLTINSLQAEDVAVYYCQQYYSIPI |
| | | TFGGGTKVEIKRTVAAPSVFIFPPSDEQLKSGTASVVCLL |
| | | NNFYPREAKVQWKVDNALQSGNSQESVTEQDSKDSTYSLS |
| | | STLTLSKADYEKHKVYACEVTHQGLSSPVTKSFNRGECSG |
| | | GGGQEVQLVESGGGLVQPGGSLKLSCAASGFTFNKYAINW |
| | | VRQAPGKGLEWVARIRSKYNNYATYYADAVKDRFTISRDD |
| | | SKNTVYLQMNNLKTEDTAVYYCARAGNFGSSYISYWAYWG |
| | | QGTLVTVSSGGGGQGGGGQGGGGQQTVVTQEPSLTVSPGG |
| | | TVTITCGSSTGAVTSGNYPNWVQKKPGQAPRGLIGGTKFL |
| | | APGTPARFSGSLSGGKAALTLSGVQPEDEAEYYCVLWYSN |
| | | RWVFGSGTKLTVLGGGGCPPCPAPELLGGPSVFLFPPKPK |
| | | DTLMISRTPEVTCVVVDVSHEEPEVKFNWYVDGVEVHNAK |
| | | TKPCEEQYGSTYRCVSVLTVLHQDWLNGKEYKCKVSNKAL |
| | | PAPIEKTISKAKGQPREPQVYTLPPSREEMTKNQVSLTCL |
| | | VKGFYPSDIAVEWESNGQPENNYKTTPPVLDSDGSFFLYS |
| | | KLTVDKSRWQQGNVFSCSVMHEALHNHYTQKSLSLSPGGG |
| | | GQGGGGQGGGGQGGGGQGGGGQGGGGQCPPCPAPELLGGP |
| | | SVFLFPPKPKDTLMISRTPEVTCVVVDVSHEEPEVKFNWY |
| | | VDGVEVHNAKTKPCEEQYGSTYRCVSVLTVLHQDWLNGKE |
| | | YKCKVSNKALPAPIEKTISKAKGQPREPQVYTLPPSREEM |
| | | TKNQVSLTCLVKGFYPSDIAVEWESNGQPENNYKTTPPVL |
| | | DSDGSFFLYSKLTVDKSRWQQGNVFSCSVMHEALHNHYTQ |
| | | KSLSLSPGK |

TABLE 25
MAGE-B2 (“MA”) and CD20 × CD22 TCE molecule sequences.
MA 03-D8 AS CC scFv × 12C × scFc

| | | |
|---|---|---|
| 261 | HCDR1 | SHAMS |
| 262 | HCDR2 | TISGSGGGTYYAASVKG |
| 263 | HCDR3 | GKGVHLGFDY |
| 264 | LCDR1 | GGNNIGSKSVH |
| 265 | LCDR2 | DDNDRPS |
| 266 | LCDR3 | QVWDYRTLDWV |
| 267 | VH | EVQLLESGGGLVQPGGSLRLSCAASGFTFSSHAMSWVRQAPG |
| | | KCLEWVSTISGSGGGTYYAASVKGRFTISRDNSKNTLYLQMN |
| | | SLRAEDTAVYYCATGKGVHLGFDYWGQGTLVTVSS |
| 268 | VL | SYVLTQPPSVSVAPGQTARITCGGNNIGSKSVHWYQQKPGQA |
| | | PVMVVYDDNDRPSGIPERFSGSNFGNTATLIISRVEAGDEADY |
| | | YCQVWDYRTLDWVFGCGTKLTVL |
| 269 | SCFV | EVQLLESGGGLVQPGGSLRLSCAASGFTFSSHAMSWVRQAPG |
| | | KCLEWVSTISGSGGGTYYAASVKGRFTISRDNSKNTLYLQMN |
| | | SLRAEDTAVYYCATGKGVHLGFDYWGQGTLVTVSSGGGGSG |
| | | GGGSGGGGSSYVLTQPPSVSVAPGQTARITCGGNNIGSKSVH |
| | | WYQQKPGQAPVMVVYDDNDRPSGIPERFSGSNFGNTATLIISR |
| | | VEAGDEADYYCQVWDYRTLDWVFGCGTKLTVL |
| 270 | BISPECIFIC | EVQLLESGGGLVQPGGSLRLSCAASGFTFSSHAMSWVRQAPG |
| | | KCLEWVSTISGSGGGTYYAASVKGRFTISRDNSKNTLYLQMN |
| | | SLRAEDTAVYYCATGKGVHLGFDYWGQGTLVTVSSGGGGSG |
| | | GGGSGGGGSSYVLTQPPSVSVAPGQTARITCGGNNIGSKSVH |
| | | WYQQKPGQAPVMVVYDDNDRPSGIPERFSGSNFGNTATLIISR |
| | | VEAGDEADYYCQVWDYRTLDWVFGCGTKLTVLSGGGGSEV |
| | | QLVESGGGLVQPGGSLKLSCAASGFTFNKYAMNWVRQAPGK |
| | | GLEWVARIRSKYNNYATYYADSVKDRFTISRDDSKNTAYLQ |
| | | MNNLKTEDTAVYYCVRHGNFGNSYISYWAYWGQGTLVTVS |
| | | SGGGGSGGGGSGGGGSQTVVTQEPSLTVSPGGTVTLTCGSST |
| | | GAVTSGNYPNWVQQKPGQAPRGLIGGTKFLAPGTPARFSGSL |
| | | LGGKAALTLSGVQPEDEAEYYCVLWYSNRWVFGGGTKLTVL |
| 271 | MOL. | EVQLLESGGGLVQPGGSLRLSCAASGFTFSSHAMSWVRQAPG |
| | BiTE HLE | KCLEWVSTISGSGGGTYYAASVKGRFTISRDNSKNTLYLQMN |
| | | SLRAEDTAVYYCATGKGVHLGFDYWGQGTLVTVSSGGGGSG |
| | | GGGSGGGGSSYVLTQPPSVSVAPGQTARITCGGNNIGSKSVH |
| | | WYQQKPGQAPVMVVYDDNDRPSGIPERFSGSNFGNTATLIISR |
| | | VEAGDEADYYCQVWDYRTLDWVFGCGTKLTVLSGGGGSEV |
| | | QLVESGGGLVQPGGSLKLSCAASGFTFNKYAMNWVRQAPGK |
| | | GLEWVARIRSKYNNYATYYADSVKDRFTISRDDSKNTAYLQ |
| | | MNNLKTEDTAVYYCVRHGNFGNSYISYWAYWGQGTLVTVS |
| | | SGGGGSGGGGSGGGGSQTVVTQEPSLTVSPGGTVTLTCGSST |
| | | GAVTSGNYPNWVQQKPGQAPRGLIGGTKFLAPGTPARFSGSL |
| | | LGGKAALTLSGVQPEDEAEYYCVLWYSNRWVFGGGTKLTVL |
| | | GGGGDKTHTCPPCPAPELLGGPSVFLFPPKPKDTLMISRTPEVT |
| | | CVVVDVSHEDPEVKFNWYVDGVEVHNAKTKPCEEQYGSTYR |
| | | CVSVLTVLHQDWLNGKEYKCKVSNKALPAPIEKTISKAKGQP |
| | | REPQVYTLPPSREEMTKNQVSLTCLVKGFYPSDIAVEWESNG |
| | | QPENNYKTTPPVLDSDGSFFLYSKLTVDKSRWQQGNVFSCSV |
| | | MHEALHNHYTQKSLSLSPGKGGGGSGGGGSGGGGSGGGGSG |
| | | GGGSGGGGSDKTHTCPPCPAPELLGGPSVFLFPPKPKDTLMIS |
| | | RTPEVTCVVVDVSHEDPEVKFNWYVDGVEVHNAKTKPCEEQ |
| | | YGSTYRCVSVLTVLHQDWLNGKEYKCKVSNKALPAPIEKTIS |
| | | KAKGQPREPQVYTLPPSREEMTKNQVSLTCLVKGFYPSDIAVE |
| | | WESNGQPENNYKTTPPVLDSDGSFFLYSKLTVDKSRWQQGN |
| | | VFSCSVMHEALHNHYTQKSLSLSPGK |

MA 03-D8 AS scFab × 12C × scFc

| | | |
|---|---|---|
| 272 | VH-CH1 | EVQLLESGGGLVQPGGSLRLSCAASGFTFSSHAMSWVRQAPG |
| | | KGLEWVSTISGSGGGTYYAASVKGRFTISRDNSKNTLYLQMN |
| | | SLRAEDTAVYYCATGKGVHLGFDYWGQGTLVTVSSASTKGP |
| | | SVFPLAPSSKSTSGGTAALGCLVKDYFPEPVTVSWNSGALTSG |
| | | VHTFPAVLQSSGLYSLSSVVTVPSSSLGTQTYICNVNHKPSNT |
| | | KVDKKVEPKSC |
| 273 | VL-CL | SYVLTQPPSVSVAPGQTARITCGGNNIGSKSVHWYQQKPGQA |
| | | PVMVVYDDNDRPSGIPERFSGSNFGNTATLIISRVEAGDEADY |
| | | YCQVWDYRTLDWVFGGGTKLTVLGQPKAAPSVTLFPPSSEEL |
| | | QANKATLVCLISDFYPGAVTVAWKADSSPVKAGVETTTPSKQ |
| | | SNNKYAASSYLSLTPEQWKSHKSYSCQVTHEGSTVEKTVAPT |
| | | ECS |
| 274 | scFab | EVQLLESGGGLVQPGGSLRLSCAASGFTFSSHAMSWVRQAPG |
| | | KGLEWVSTISGSGGGTYYAASVKGRFTISRDNSKNTLYLQMN |
| | | SLRAEDTAVYYCATGKGVHLGFDYWGQGTLVTVSSASTKGP |
| | | SVFPLAPSSKSTSGGTAALGCLVKDYFPEPVTVSWNSGALTSG |
| | | VHTFPAVLQSSGLYSLSSVVTVPSSSLGTQTYICNVNHKPSNT |
| | | KVDKKVEPKSCGGGGSGGGGSGGGGSGGGGSGGGGSGGGG |
| | | SGGGGSGGGGSSYVLTQPPSVSVAPGQTARITCGGNNIGSKSV |
| | | HWYQQKPGQAPVMVVYDDNDRPSGIPERFSGSNFGNTATLIIS |
| | | RVEAGDEADYYCQVWDYRTLDWVFGGGTKLTVLGQPKAAP |
| | | SVTLFPPSSEELQANKATLVCLISDFYPGAVTVAWKADSSPVK |
| | | AGVETTTPSKQSNNKYAASSYLSLTPEQWKSHKSYSCQVTHE |
| | | GSTVEKTVAPTECS |
| 275 | scFab- | EVQLLESGGGLVQPGGSLRLSCAASGFTFSSHAMSWVRQAPG |
| | BISPECIFIC | KGLEWVSTISGSGGGTYYAASVKGRFTISRDNSKNTLYLQMN |
| | MOL. | SLRAEDTAVYYCATGKGVHLGFDYWGQGTLVTVSSASTKGP |
| | | SVFPLAPSSKSTSGGTAALGCLVKDYFPEPVTVSWNSGALTSG |
| | | VHTFPAVLQSSGLYSLSSVVTVPSSSLGTQTYICNVNHKPSNT |
| | | KVDKKVEPKSCGGGGSGGGGSGGGGSGGGGSGGGGSGGGG |
| | | SGGGGSGGGGSSYVLTQPPSVSVAPGQTARITCGGNNIGSKSV |
| | | HWYQQKPGQAPVMVVYDDNDRPSGIPERFSGSNFGNTATLIIS |
| | | RVEAGDEADYYCQVWDYRTLDWVFGGGTKLTVLGQPKAAP |
| | | SVTLFPPSSEELQANKATLVCLISDFYPGAVTVAWKADSSPVK |
| | | AGVETTTPSKQSNNKYAASSYLSLTPEQWKSHKSYSCQVTHE |
| | | GSTVEKTVAPTECSSGGGGSEVQLVESGGGLVQPGGSLKLSC |
| | | AASGFTFNKYAMNWVRQAPGKGLEWVARIRSKYNNYATYY |
| | | ADSVKDRFTISRDDSKNTAYLQMNNLKTEDTAVYYCVRHGN |
| | | FGNSYISYWAYWGQGTLVTVSSGGGGSGGGGSGGGGSQTVV |
| | | TQEPSLTVSPGGTVTLTCGSSTGAVTSGNYPNWVQQKPGQAP |
| | | RGLIGGTKFLAPGTPARFSGSLLGGKAALTLSGVQPEDEAEYY |
| | | CVLWYSNRWVFGGGTKLTVL |
| 276 | scFab-BiTE | EVQLLESGGGLVQPGGSLRLSCAASGFTFSSHAMSWVRQAPG |
| | HLE | KGLEWVSTISGSGGGTYYAASVKGRFTISRDNSKNTLYLQMN |
| | | SLRAEDTAVYYCATGKGVHLGFDYWGQGTLVTVSSASTKGP |
| | | SVFPLAPSSKSTSGGTAALGCLVKDYFPEPVTVSWNSGALTSG |
| | | VHTFPAVLQSSGLYSLSSVVTVPSSSLGTQTYICNVNHKPSNT |
| | | KVDKKVEPKSCGGGGSGGGGSGGGGSGGGGSGGGGSGGGG |
| | | SGGGGSGGGGSSYVLTQPPSVSVAPGQTARITCGGNNIGSKSV |
| | | HWYQQKPGQAPVMVVYDDNDRPSGIPERFSGSNFGNTATLIIS |
| | | RVEAGDEADYYCQVWDYRTLDWVFGGGTKLTVLGQPKAAP |
| | | SVTLFPPSSEELQANKATLVCLISDFYPGAVTVAWKADSSPVK |
| | | AGVETTTPSKQSNNKYAASSYLSLTPEQWKSHKSYSCQVTHE |
| | | GSTVEKTVAPTECSSGGGGSEVQLVESGGGLVQPGGSLKLSC |
| | | AASGFTFNKYAMNWVRQAPGKGLEWVARIRSKYNNYATYY |
| | | ADSVKDRFTISRDDSKNTAYLQMNNLKTEDTAVYYCVRHGN |
| | | FGNSYISYWAYWGQGTLVTVSSGGGGSGGGGSGGGGSQTVV |
| | | TQEPSLTVSPGGTVTLTCGSSTGAVTSGNYPNWVQQKPGQAP |
| | | RGLIGGTKFLAPGTPARFSGSLLGGKAALTLSGVQPEDEAEYY |
| | | CVLWYSNRWVFGGGTKLTVLGGGGDKTHTCPPCPAPELLGG |
| | | PSVFLFPPKPKDTLMISRTPEVTCVVVDVSHEDPEVKFNWYVD |
| | | GVEVHNAKTKPCEEQYGSTYRCVSVLTVLHQDWLNGKEYKC |
| | | KVSNKALPAPIEKTISKAKGQPREPQVYTLPPSREEMTKNQVS |
| | | LTCLVKGFYPSDIAVEWESNGQPENNYKTTPPVLDSDGSFFLY |
| | | SKLTVDKSRWQQGNVFSCSVMHEALHNHYTQKSLSLSPGKG |
| | | GGGSGGGGSGGGGSGGGGSGGGGSGGGGSDKTHTCPPCPAP |
| | | ELLGGPSVFLFPPKPKDTLMISRTPEVTCVVVDVSHEDPEVKF |
| | | NWYVDGVEVHNAKTKPCEEQYGSTYRCVSVLTVLHQDWLN |
| | | GKEYKCKVSNKALPAPIEKTISKAKGQPREPQVYTLPPSREEM |
| | | TKNQVSLTCLVKGFYPSDIAVEWESNGQPENNYKTTPPVLDS |
| | | DGSFFLYSKLTVDKSRWQQGNVFSCSVMHEALHNHYTQKSL |
| | | SLSPGK |

MA 98-C7 CC scFv × I2C × scFc

| | | |
|---|---|---|
| 277 | HCDR1 | SHAMS |
| 278 | HCDR2 | SISGSGGGTYYAASVKG |
| 279 | HCDR3 | GKGVHLGFDY |
| 280 | LCDR1 | GGNNIGSKSVH |
| 281 | LCDR2 | DDNDRPS |
| 282 | LCDR3 | QVWDYSPLRHV |
| 283 | VH | EVQLLESGGGLVQPGGSLRLSCAASGFTFSSHAMSWVRQAPG |
| | | KCLEWVSSISGSGGGTYYAASVKGRFTISRDNSKNTLYLQMN |
| | | SLRAEDTAVYYCATGKGVHLGFDYWGQGTLVTVSS |
| 284 | VL | SYVLTQPPSVSVAPGQTARITCGGNNIGSKSVHWYQQKPGQA |
| | | PVMVVYDDNDRPSGIPERFSGSNSGNTATLTISRVEAGDEADY |
| | | YCQVWDYSPLRHVFGCGTKLTVL |
| 285 | SCFV | EVQLLESGGGLVQPGGSLRLSCAASGFTFSSHAMSWVRQAPG |
| | | KCLEWVSSISGSGGGTYYAASVKGRFTISRDNSKNTLYLQMN |
| | | SLRAEDTAVYYCATGKGVHLGFDYWGQGTLVTVSSGGGGSG |
| | | GGGSGGGGSSYVLTQPPSVSVAPGQTARITCGGNNIGSKSVH |
| | | WYQQKPGQAPVMVVYDDNDRPSGIPERFSGSNSGNTATLTIS |
| | | RVEAGDEADYYCQVWDYSPLRHVFGCGTKLTVL |
| 286 | BISPECIFIC | EVQLLESGGGLVQPGGSLRLSCAASGFTFSSHAMSWVRQAPG |
| | MOL. | KCLEWVSSISGSGGGTYYAASVKGRFTISRDNSKNTLYLQMN |
| | | SLRAEDTAVYYCATGKGVHLGFDYWGQGTLVTVSSGGGGSG |
| | | GGGSGGGGSSYVLTQPPSVSVAPGQTARITCGGNNIGSKSVH |
| | | WYQQKPGQAPVMVVYDDNDRPSGIPERFSGSNSGNTATLTIS |
| | | RVEAGDEADYYCQVWDYSPLRHVFGCGTKLTVLSGGGGSEV |
| | | QLVESGGGLVQPGGSLKLSCAASGFTFNKYAMNWVRQAPGK |
| | | GLEWVARIRSKYNNYATYYADSVKDRFTISRDDSKNTAYLQ |
| 287 | BiTE HLE | MNNLKTEDTAVYYCVRHGNFGNSYISYWAYWGQGTLVTVS |
| | | SGGGGSGGGGSGGGGSQTVVTQEPSLTVSPGGTVTLTCGSST |
| | | GAVTSGNYPNWVQQKPGQAPRGLIGGTKFLAPGTPARFSGSL |
| | | LGGKAALTLSGVQPEDEAEYYCVLWYSNRWVFGGGTKLTVL |
| | | EVQLLESGGGLVQPGGSLRLSCAASGFTFSSHAMSWVRQAPG |
| | | KCLEWVSSISGSGGGTYYAASVKGRFTISRDNSKNTLYLQMN |
| | | SLRAEDTAVYYCATGKGVHLGFDYWGQGTLVTVSSGGGGSG |
| | | GGGSGGGGSSYVLTQPPSVSVAPGQTARITCGGNNIGSKSVH |
| | | WYQQKPGQAPVMVVYDDNDRPSGIPERFSGSNSGNTATLTIS |
| | | RVEAGDEADYYCQVWDYSPLRHVFGCGTKLTVLSGGGGSEV |
| | | QLVESGGGLVQPGGSLKLSCAASGFTFNKYAMNWVRQAPGK |
| | | GLEWVARIRSKYNNYATYYADSVKDRFTISRDDSKNTAYLQ |
| | | MNNLKTEDTAVYYCVRHGNFGNSYISYWAYWGQGTLVTVS |
| | | SGGGGSGGGGSGGGGSQTVVTQEPSLTVSPGGTVTLTCGSST |
| | | GAVTSGNYPNWVQQKPGQAPRGLIGGTKFLAPGTPARFSGSL |
| | | LGGKAALTLSGVQPEDEAEYYCVLWYSNRWVFGGGTKLTVL |
| | | GGGGDKTHTCPPCPAPELLGGPSVFLFPPKPKDTLMISRTPEVT |
| | | CVVVDVSHEDPEVKFNWYVDGVEVHNAKTKPCEEQYGSTYR |
| | | CVSVLTVLHQDWLNGKEYKCKVSNKALPAPIEKTISKAKGQP |
| | | REPQVYTLPPSREEMTKNQVSLTCLVKGFYPSDIAVEWESNG |
| | | QPENNYKTTPPVLDSDGSFFLYSKLTVDKSRWQQGNVFSCSV |
| | | MHEALHNHYTQKSLSLSPGKGGGGSGGGGSGGGGSGGGGSG |
| | | GGGSGGGGSDKTHTCPPCPAPELLGGPSVFLFPPKPKDTLMIS |
| | | RTPEVTCVVVDVSHEDPEVKFNWYVDGVEVHNAKTKPCEEQ |
| | | YGSTYRCVSVLTVLHQDWLNGKEYKCKVSNKALPAPIEKTIS |
| | | KAKGQPREPQVYTLPPSREEMTKNQVSLTCLVKGFYPSDIAVE |
| | | WESNGQPENNYKTTPPVLDSDGSFFLYSKLTVDKSRWQQGN |
| | | VFSCSVMHEALHNHYTQKSLSLSPGK |

MA 98-C7 scFab × I2C × scFc

| | | |
|---|---|---|
| 288 | VH-CH1 | EVQLLESGGGLVQPGGSLRLSCAASGFTFSSHAMSWVRQAPG |
| | | KGLEWVSSISGSGGGTYYAASVKGRFTISRDNSKNTLYLQMN |
| | | SLRAEDTAVYYCATGKGVHLGFDYWGQGTLVTVSSASTKGP |
| | | SVFPLAPSSKSTSGGTAALGCLVKDYFPEPVTVSWNSGALTSG |
| | | VHTFPAVLQSSGLYSLSSVVTVPSSSLGTQTYICNVNHKPSNT |
| | | KVDKKVEPKSC |
| 289 | VL-CL | SYVLTQPPSVSVAPGQTARITCGGNNIGSKSVHWYQQKPGQA |
| | | PVMVVYDDNDRPSGIPERFSGSNSGNTATLTISRVEAGDEADY |
| | | YCQVWDYSPLRHVFGGGTKLTVLGQPKAAPSVTLFPPSSEEL |
| | | QANKATLVCLISDFYPGAVTVAWKADSSPVKAGVETTTPSKQ |
| | | SNNKYAASSYLSLTPEQWKSHKSYSCQVTHEGSTVEKTVAPT |
| | | ECS |
| 290 | scFab | EVQLLESGGGLVQPGGSLRLSCAASGFTFSSHAMSWVRQAPG |
| | | KGLEWVSSISGSGGGTYYAASVKGRFTISRDNSKNTLYLQMN |
| | | SLRAEDTAVYYCATGKGVHLGFDYWGQGTLVTVSSASTKGP |
| | | SVFPLAPSSKSTSGGTAALGCLVKDYFPEPVTVSWNSGALTSG |
| | | VHTFPAVLQSSGLYSLSSVVTVPSSSLGTQTYICNVNHKPSNT |
| | | KVDKKVEPKSCGGGGSGGGGSGGGGSGGGGSGGGGSGGGG |
| | | SGGGGSGGGGSSYVLTQPPSVSVAPGQTARITCGGNNIGSKSV |
| | | HWYQQKPGQAPVMVVYDDNDRPSGIPERFSGSNSGNTATLTI |
| | | SRVEAGDEADYYCQVWDYSPLRHVFGGGTKLTVLGQPKAAP |
| | | SVTLFPPSSEELQANKATLVCLISDFYPGAVTVAWKADSSPVK |
| | | AGVETTTPSKQSNNKYAASSYLSLTPEQWKSHKSYSCQVTHE |
| | | GSTVEKTVAPTECS |
| 291 | scFab- | EVQLLESGGGLVQPGGSLRLSCAASGFTFSSHAMSWVRQAPG |
| | BISPECIFIC | KGLEWVSSISGSGGGTYYAASVKGRFTISRDNSKNTLYLQMN |
| | MOL. | SLRAEDTAVYYCATGKGVHLGFDYWGQGTLVTVSSASTKGP |
| | | SVFPLAPSSKSTSGGTAALGCLVKDYFPEPVTVSWNSGALTSG |
| | | VHTFPAVLQSSGLYSLSSVVTVPSSSLGTQTYICNVNHKPSNT |
| | | KVDKKVEPKSCGGGGSGGGGSGGGGSGGGGSGGGGSGGGG |
| | | SGGGGSGGGGSSYVLTQPPSVSVAPGQTARITCGGNNIGSKSV |
| | | HWYQQKPGQAPVMVVYDDNDRPSGIPERFSGSNSGNTATLTI |
| | | SRVEAGDEADYYCQVWDYSPLRHVFGGGTKLTVLGQPKAAP |
| | | SVTLFPPSSEELQANKATLVCLISDFYPGAVTVAWKADSSPVK |
| | | AGVETTTPSKQSNNKYAASSYLSLTPEQWKSHKSYSCQVTHE |
| | | GSTVEKTVAPTECSSGGGGSEVQLVESGGGLVQPGGSLKLSC |
| | | AASGFTFNKYAMNWVRQAPGKGLEWVARIRSKYNNYATYY |
| | | ADSVKDRFTISRDDSKNTAYLQMNNLKTEDTAVYYCVRHGN |
| | | FGNSYISYWAYWGQGTLVTVSSGGGGSGGGGSGGGGSQTVV |
| | | TQEPSLTVSPGGTVTLTCGSSTGAVTSGNYPNWVQQKPGQAP |
| | | RGLIGGTKFLAPGTPARFSGSLLGGKAALTLSGVQPEDEAEYY |
| | | CVLWYSNRWVFGGGTKLTVL |
| | | EVQLLESGGGLVQPGGSLRLSCAASGFTFSSHAMSWVRQAPG |
| | | KGLEWVSSISGSGGGTYYAASVKGRFTISRDNSKNTLYLQMN |
| | | SLRAEDTAVYYCATGKGVHLGFDYWGQGTLVTVSSASTKGP |
| | | SVFPLAPSSKSTSGGTAALGCLVKDYFPEPVTVSWNSGALTSG |
| | | VHTFPAVLQSSGLYSLSSVVTVPSSSLGTQTYICNVNHKPSNT |
| 292 | scFab-BiTE | KVDKKVEPKSCGGGGSGGGGSGGGGSGGGGSGGGGSGGGG |
| | HLE | SGGGGSGGGGSSYVLTQPPSVSVAPGQTARITCGGNNIGSKSV |
| | | HWYQQKPGQAPVMVVYDDNDRPSGIPERFSGSNSGNTATLTI |
| | | SRVEAGDEADYYCQVWDYSPLRHVFGGGTKLTVLGQPKAAP |
| | | SVTLFPPSSEELQANKATLVCLISDFYPGAVTVAWKADSSPVK |
| | | AGVETTTPSKQSNNKYAASSYLSLTPEQWKSHKSYSCQVTHE |
| | | GSTVEKTVAPTECSSGGGGSEVQLVESGGGLVQPGGSLKLSC |
| | | AASGFTFNKYAMNWVRQAPGKGLEWVARIRSKYNNYATYY |
| | | ADSVKDRFTISRDDSKNTAYLQMNNLKTEDTAVYYCVRHGN |
| | | FGNSYISYWAYWGQGTLVTVSSGGGGSGGGGSGGGGSQTVV |
| | | TQEPSLTVSPGGTVTLTCGSSTGAVTSGNYPNWVQQKPGQAP |
| | | RGLIGGTKFLAPGTPARFSGSLLGGKAALTLSGVQPEDEAEYY |
| | | CVLWYSNRWVFGGGTKLTVLGGGGDKTHTCPPCPAPELLGG |
| | | PSVFLFPPKPKDTLMISRTPEVTCVVVDVSHEDPEVKFNWYVD |
| | | GVEVHNAKTKPCEEQYGSTYRCVSVLTVLHQDWLNGKEYKC |
| | | KVSNKALPAPIEKTISKAKGQPREPQVYTLPPSREEMTKNQVS |
| | | LTCLVKGFYPSDIAVEWESNGQPENNYKTTPPVLDSDGSFFLY |
| | | SKLTVDKSRWQQGNVFSCSVMHEALHNHYTQKSLSLSPGKG |
| | | GGGSGGGGSGGGGSGGGGSGGGGSGGGGSDKTHTCPPCPAP |
| | | ELLGGPSVFLFPPKPKDTLMISRTPEVTCVVVDVSHEDPEVKF |
| | | NWYVDGVEVHNAKTKPCEEQYGSTYRCVSVLTVLHQDWLN |
| | | GKEYKCKVSNKALPAPIEKTISKAKGQPREPQVYTLPPSREEM |
| | | TKNQVSLTCLVKGFYPSDIAVEWESNGQPENNYKTTPPVLDS |
| | | DGSFFLYSKLTVDKSRWQQGNVFSCSVMHEALHNHYTQKSL |
| | | SLSPGK |

MA 09-E2 CC scFv × I2C × scFc

| | | |
|---|---|---|
| 293 | HCDR1 | NAWMS |
| 294 | HCDR2 | RIKSKTYGGTTDYAAPVKG |
| 295 | HCDR3 | PSYSGSYYNYFSVMDV |
| 296 | LCDR1 | RTSQSISSYLN |
| 297 | LCDR2 | AASSLQG |
| 298 | LCDR3 | QQSYSSPFT |
| 299 | VH | EVQLVESGGGLVQPGGSLRLSCAASGFTFSNAWMSWVRQAP |
| | | GKCLEWVGRIKSKTYGGTTDYAAPVKGRFTISRDDSKNTLFL |
| | | QMNSLKTEDTAVYYCTTPSYSGSYYNYFSVMDVWGQGTTVT |
| | | VSS |
| 300 | VL | DIQMTQSPSSLSASVGDRVTITCRTSQSISSYLNWYQQKPGRA |
| | | PKLLIFAASSLQGGVPSRFSGSGSGTDFTLTISSLQPEDFATY |
| | | YCQQSYSSPFTFGCGTKVEIK |
| 301 | SCFV | EVQLVESGGGLVQPGGSLRLSCAASGFTFSNAWMSWVRQAP |
| | | GKCLEWVGRIKSKTYGGTTDYAAPVKGRFTISRDDSKNTLFL |
| | | QMNSLKTEDTAVYYCTTPSYSGSYYNYFSVMDVWGQGTTVT |
| | | VSSGGGGSGGGGSGGGGSDIQMTQSPSSLSASVGDRVTITCRT |
| | | SQSISSYLNWYQQKPGRAPKLLIFAASSLQGGVPSRFSGSGSGT |
| | | DFTLTISSLQPEDFATYYCQQSYSSPFTFGCGTKVEIK |
| 302 | BISPECIFIC | EVQLVESGGGLVQPGGSLRLSCAASGFTFSNAWMSWVRQAP |
| | MOL. | GKCLEWVGRIKSKTYGGTTDYAAPVKGRFTISRDDSKNTLFL |
| | | QMNSLKTEDTAVYYCTTPSYSGSYYNYFSVMDVWGQGTTVT |
| | | VSSGGGGSGGGGSGGGGSDIQMTQSPSSLSASVGDRVTITCRT |
| | | SQSISSYLNWYQQKPGRAPKLLIFAASSLQGGVPSRFSGSGSGT |
| | | DFTLTISSLQPEDFATYYCQQSYSSPFTFGCGTKVEIKSGGGGS |
| | | EVQLVESGGGLVQPGGSLKLSCAASGFTFNKYAMNWVRQAP |
| | | GKGLEWVARIRSKYNNYATYYADSVKDRFTISRDDSKNTAYL |
| | | QMNNLKTEDTAVYYCVRHGNFGNSYISYWAYWGQGTLVTV |
| | | SSGGGGSGGGGSGGGGSQTVVTQEPSLTVSPGGTVTLTCGSST |
| | | GAVTSGNYPNWVQQKPGQAPRGLIGGTKFLAPGTPARFSGSL |
| | | LGGKAALTLSGVQPEDEAEYYCVLWYSNRWVFGGGTKLTVL |
| 303 | BiTE HLE | EVQLVESGGGLVQPGGSLRLSCAASGFTFSNAWMSWVRQAP |
| | | GKCLEWVGRIKSKTYGGTTDYAAPVKGRFTISRDDSKNTLFL |
| | | QMNSLKTEDTAVYYCTTPSYSGSYYNYFSVMDVWGQGTTVT |
| | | VSSGGGGSGGGGSGGGGSDIQMTQSPSSLSASVGDRVTITCRT |
| | | SQSISSYLNWYQQKPGRAPKLLIFAASSLQGGVPSRFSGSGSGT |
| | | DFTLTISSLQPEDFATYYCQQSYSSPFTFGCGTKVEIKSGGGGS |
| | | EVQLVESGGGLVQPGGSLKLSCAASGFTFNKYAMNWVRQAP |
| | | GKGLEWVARIRSKYNNYATYYADSVKDRFTISRDDSKNTAYL |
| | | QMNNLKTEDTAVYYCVRHGNFGNSYISYWAYWGQGTLVTV |
| | | SSGGGGSGGGGSGGGGSQTVVTQEPSLTVSPGGTVTLTCGSST |
| | | GAVTSGNYPNWVQQKPGQAPRGLIGGTKFLAPGTPARFSGSL |
| | | LGGKAALTLSGVQPEDEAEYYCVLWYSNRWVFGGGTKLTVL |
| | | GGGGDKTHTCPPCPAPELLGGPSVFLFPPKPKDTLMISRTPEVT |
| | | CVVVDVSHEDPEVKFNWYVDGVEVHNAKTKPCEEQYGSTYR |
| | | CVSVLTVLHQDWLNGKEYKCKVSNKALPAPIEKTISKAKGQP |
| | | REPQVYTLPPSREEMTKNQVSLTCLVKGFYPSDIAVEWESNG |
| | | QPENNYKTTPPVLDSDGSFFLYSKLTVDKSRWQQGNVFSCSV |
| | | MHEALHNHYTQKSLSLSPGKGGGGSGGGGSGGGGSGGGGSG |
| | | GGGSGGGGSDKTHTCPPCPAPELLGGPSVFLFPPKPKDTLMIS |
| | | RTPEVTCVVVDVSHEDPEVKFNWYVDGVEVHNAKTKPCEEQ |
| | | YGSTYRCVSVLTVLHQDWLNGKEYKCKVSNKALPAPIEKTIS |
| | | KAKGQPREPQVYTLPPSREEMTKNQVSLTCLVKGFYPSDIAVE |
| | | WESNGQPENNYKTTPPVLDSDGSFFLYSKLTVDKSRWQQGN |
| | | VFSCSVMHEALHNHYTQKSLSLSPGK |

MA 09-E2 scFab × I2C × scFc

| | | |
|---|---|---|
| 304 | VH-CH1 | EVQLVESGGGLVQPGGSLRLSCAASGFTFSNAWMSWVRQAP |
| | | GKGLEWVGRIKSKTYGGTTDYAAPVKGRFTISRDDSKNTLFL |
| | | QMNSLKTEDTAVYYCTTPSYSGSYYNYFSVMDVWGQGTTVT |
| | | VSSASTKGPSVFPLAPSSKSTSGGTAALGCLVKDYFPEPVTVS |
| | | WNSGALTSGVHTFPAVLQSSGLYSLSSVVTVPSSSLGTQTYIC |
| | | NVNHKPSNTKVDKKVEPKSC |
| 305 | VL-CL | DIQMTQSPSSLSASVGDRVTITCRTSQSISSYLNWYQQKPGRA |
| | | PKLLIFAASSLQGGVPSRFSGSGSGTDFTLTISSLQPEDFATYYC |
| | | QQSYSSPFTFGPGTKVEIKRTVAAPSVFIFPPSDEQLKSGTASV |
| | | VCLLNNFYPREAKVQWKVDNALQSGNSQESVTEQDSKDSTY |
| | | SLSSTLTLSKADYEKHKVYACEVTHQGLSSPVTKSFNRGEC |
| 306 | scFab | EVQLVESGGGLVQPGGSLRLSCAASGFTFSNAWMSWVRQAP |
| | | GKGLEWVGRIKSKTYGGTTDYAAPVKGRFTISRDDSKNTLFL |
| | | QMNSLKTEDTAVYYCTTPSYSGSYYNYFSVMDVWGQGTTVT |
| | | VSSASTKGPSVFPLAPSSKSTSGGTAALGCLVKDYFPEPVTVS |
| | | WNSGALTSGVHTFPAVLQSSGLYSLSSVVTVPSSSLGTQTYIC |
| | | NVNHKPSNTKVDKKVEPKSCGGGGSGGGGSGGGGSGGGGSG |
| | | GGGSGGGGSGGGGSGGGGSDIQMTQSPSSLSASVGDRVTITC |
| | | RTSQSISSYLNWYQQKPGRAPKLLIFAASSLQGGVPSRFSGSGS |
| | | GTDFTLTISSLQPEDFATYYCQQSYSSPFTFGPGTKVEIKRTVA |
| | | APSVFIFPPSDEQLKSGTASVVCLLNNFYPREAKVQWKVDNA |
| | | LQSGNSQESVTEQDSKDSTYSLSSTLTLSKADYEKHKVYACE |
| | | VTHQGLSSPVTKSFNRGEC |
| 307 | scFab- | EVQLVESGGGLVQPGGSLRLSCAASGFTFSNAWMSWVRQAP |
| | BISPECIFIC | GKGLEWVGRIKSKTYGGTTDYAAPVKGRFTISRDDSKNTLFL |
| | MOL. | QMNSLKTEDTAVYYCTTPSYSGSYYNYFSVMDVWGQGTTVT |
| | | VSSASTKGPSVFPLAPSSKSTSGGTAALGCLVKDYFPEPVTVS |
| | | WNSGALTSGVHTFPAVLQSSGLYSLSSVVTVPSSSLGTQTYIC |
| | | NVNHKPSNTKVDKKVEPKSCGGGGSGGGGSGGGGSGGGGSG |
| | | GGGSGGGGSGGGGSGGGGSDIQMTQSPSSLSASVGDRVTITC |
| | | RTSQSISSYLNWYQQKPGRAPKLLIFAASSLQGGVPSRFSGSGS |
| | | GTDFTLTISSLQPEDFATYYCQQSYSSPFTFGPGTKVEIKRTVA |
| | | APSVFIFPPSDEQLKSGTASVVCLLNNFYPREAKVQWKVDNA |
| | | LQSGNSQESVTEQDSKDSTYSLSSTLTLSKADYEKHKVYACE |
| | | VTHQGLSSPVTKSFNRGECSGGGGSEVQLVESGGGLVQPGGS |
| | | LKLSCAASGFTFNKYAMNWVRQAPGKGLEWVARIRSKYNNY |
| | | ATYYADSVKDRFTISRDDSKNTAYLQMNNLKTEDTAVYYCV |
| | | RHGNFGNSYISYWAYWGQGTLVTVSSGGGGSGGGGSGGGGS |
| | | QTVVTQEPSLTVSPGGTVTLTCGSSTGAVTSGNYPNWVQQKP |
| | | GQAPRGLIGGTKFLAPGTPARFSGSLLGGKAALTLSGVQPEDE |
| | | AEYYCVLWYSNRWVFGGGTKLTVL |
| 308 | scFab-BiTE | EVQLVESGGGLVQPGGSLRLSCAASGFTFSNAWMSWVRQAP |
| | HLE | GKGLEWVGRIKSKTYGGTTDYAAPVKGRFTISRDDSKNTLFL |
| | | QMNSLKTEDTAVYYCTTPSYSGSYYNYFSVMDVWGQGTTVT |
| | | VSSASTKGPSVFPLAPSSKSTSGGTAALGCLVKDYFPEPVTVS |
| | | WNSGALTSGVHTFPAVLQSSGLYSLSSVVTVPSSSLGTQTYIC |
| | | NVNHKPSNTKVDKKVEPKSCGGGGSGGGGSGGGGSGGGGSG |
| | | GGGSGGGGSGGGGSGGGGSDIQMTQSPSSLSASVGDRVTITC |
| | | RTSQSISSYLNWYQQKPGRAPKLLIFAASSLQGGVPSRFSGSGS |
| | | GTDFTLTISSLQPEDFATYYCQQSYSSPFTFGPGTKVEIKRTVA |
| | | APSVFIFPPSDEQLKSGTASVVCLLNNFYPREAKVQWKVDNA |
| | | LQSGNSQESVTEQDSKDSTYSLSSTLTLSKADYEKHKVYACE |
| | | VTHQGLSSPVTKSFNRGECSGGGGSEVQLVESGGGLVQPGGS |
| | | LKLSCAASGFTFNKYAMNWVRQAPGKGLEWVARIRSKYNNY |
| | | ATYYADSVKDRFTISRDDSKNTAYLQMNNLKTEDTAVYYCV |
| | | RHGNFGNSYISYWAYWGQGTLVTVSSGGGGSGGGGSGGGGS |
| | | QTVVTQEPSLTVSPGGTVTLTCGSSTGAVTSGNYPNWVQQKP |
| | | GQAPRGLIGGTKFLAPGTPARFSGSLLGGKAALTLSGVQPEDE |
| | | AEYYCVLWYSNRWVFGGGTKLTVLGGGGDKTHTCPPCPAPE |
| | | LLGGPSVFLFPPKPKDTLMISRTPEVTCVVVDVSHEDPEVKFN |
| | | WYVDGVEVHNAKTKPCEEQYGSTYRCVSVLTVLHQDWLNG |
| | | KEYKCKVSNKALPAPIEKTISKAKGQPREPQVYTLPPSREEMT |
| | | KNQVSLTCLVKGFYPSDIAVEWESNGQPENNYKTTPPVLDSD |
| | | GSFFLYSKLTVDKSRWQQGNVFSCSVMHEALHNHYTQKSLSL |
| | | SPGKGGGGSGGGGSGGGGSGGGGSGGGGSGGGGSDKTHTCP |
| | | PCPAPELLGGPSVFLFPPKPKDTLMISRTPEVTCVVVDVSHEDP |
| | | EVKFNWYVDGVEVHNAKTKPCEEQYGSTYRCVSVLTVLHQD |
| | | WLNGKEYKCKVSNKALPAPIEKTISKAKGQPREPQVYTLPPSR |
| | | EEMTKNQVSLTCLVKGFYPSDIAVEWESNGQPENNYKTTPPV |
| | | LDSDGSFFLYSKLTVDKSRWQQGNVFSCSVMHEALHNHYTQ |
| | | KSLSLSPGK |

MA 03-E11 AS CC scFv × I2C × scFc

| | | |
|---|---|---|
| 309 | HCDR1 | SHAMS |
| 310 | HCDR2 | AISGSGGGTYNAASVKG |
| 311 | HCDR3 | GKGVHLGFDY |
| 312 | LCDR1 | GGNNIGSKSVH |
| 313 | LCDR2 | DDNDRPS |
| 314 | LCDR3 | QVWDYYSNRAV |
| 315 | VH | EVQLLESGGGLVQPGGSLRLSCAASGFTFSSHAMSWVRQAPG |
| | | KCLEWVSAISGSGGGTYNAASVKGRFTISRDNSKNTLYLQMN |
| | | SLRAEDTAAYYCVTGKGVHLGFDYWGQGTLVTVSS |
| 316 | VL | SYVLTQPPSVSVAPGQTARITCGGNNIGSKSVHWYQQKPGQA |
| | | PVMVVYDDNDRPSGIPERFSGSNSGNTATLTISRVEAGDEADY |
| | | YCQVWDYYSNRAVFGCGTKLTVL |
| 317 | SCFV | EVQLLESGGGLVQPGGSLRLSCAASGFTFSSHAMSWVRQAPG |
| | | KCLEWVSAISGSGGGTYNAASVKGRFTISRDNSKNTLYLQMN |
| | | SLRAEDTAAYYCVTGKGVHLGFDYWGQGTLVTVSSGGGGSG |
| | | GGGSGGGGSSYVLTQPPSVSVAPGQTARITCGGNNIGSKSVH |
| | | WYQQKPGQAPVMVVYDDNDRPSGIPERFSGSNSGNTATLTIS |
| | | RVEAGDEADYYCQVWDYYSNRAVFGCGTKLTVL |
| 318 | BISPECIFIC | EVQLLESGGGLVQPGGSLRLSCAASGFTFSSHAMSWVRQAPG |
| | | KCLEWVSAISGSGGGTYNAASVKGRFTISRDNSKNTLYLQMN |
| | | SLRAEDTAAYYCVTGKGVHLGFDYWGQGTLVTVSSGGGGSG |
| | | GGGSGGGGSSYVLTQPPSVSVAPGQTARITCGGNNIGSKSVH |
| | | WYQQKPGQAPVMVVYDDNDRPSGIPERFSGSNSGNTATLTIS |
| | | RVEAGDEADYYCQVWDYYSNRAVFGCGTKLTVLSGGGGSE |
| | | VQLVESGGGLVQPGGSLKLSCAASGFTFNKYAMNWVRQAPG |
| | | KGLEWVARIRSKYNNYATYYADSVKDRFTISRDDSKNTAYLQ |
| | | MNNLKTEDTAVYYCVRHGNFGNSYISYWAYWGQGTLVTVS |
| | | SGGGGSGGGGSGGGGSQTVVTQEPSLTVSPGGTVTLTCGSST |
| | | GAVTSGNYPNWVQQKPGQAPRGLIGGTKFLAPGTPARFSGSL |
| | | LGGKAALTLSGVQPEDEAEYYCVLWYSNRWVFGGGTKLTVL |
| 319 | MOL. | EVQLLESGGGLVQPGGSLRLSCAASGFTFSSHAMSWVRQAPG |
| | BiTE HLE | KCLEWVSAISGSGGGTYNAASVKGRFTISRDNSKNTLYLQMN |
| | | SLRAEDTAAYYCVTGKGVHLGFDYWGQGTLVTVSSGGGGSG |
| | | GGGSGGGGSSYVLTQPPSVSVAPGQTARITCGGNNIGSKSVH |
| | | WYQQKPGQAPVMVVYDDNDRPSGIPERFSGSNSGNTATLTIS |
| | | RVEAGDEADYYCQVWDYYSNRAVFGCGTKLTVLSGGGGSE |
| | | VQLVESGGGLVQPGGSLKLSCAASGFTFNKYAMNWVRQAPG |
| | | KGLEWVARIRSKYNNYATYYADSVKDRFTISRDDSKNTAYLQ |
| | | MNNLKTEDTAVYYCVRHGNFGNSYISYWAYWGQGTLVTVS |
| | | SGGGGSGGGGSGGGGSQTVVTQEPSLTVSPGGTVTLTCGSST |
| | | GAVTSGNYPNWVQQKPGQAPRGLIGGTKFLAPGTPARFSGSL |
| | | LGGKAALTLSGVQPEDEAEYYCVLWYSNRWVFGGGTKLTVL |
| | | GGGGDKTHTCPPCPAPELLGGPSVFLFPPKPKDTLMISRTPEV |
| | | TCVVVDVSHEDPEVKFNWYVDGVEVHNAKTKPCEEQYGSTYR |
| | | CVSVLTVLHQDWLNGKEYKCKVSNKALPAPIEKTISKAKGQP |
| | | REPQVYTLPPSREEMTKNQVSLTCLVKGFYPSDIAVEWESNG |
| | | QPENNYKTTPPVLDSDGSFFLYSKLTVDKSRWQQGNVFSCSV |
| | | MHEALHNHYTQKSLSLSPGKGGGGSGGGGSGGGGSGGGGSG |
| | | GGGSGGGGSDKTHTCPPCPAPELLGGPSVFLFPPKPKDTLMIS |
| | | RTPEVTCVVVDVSHEDPEVKFNWYVDGVEVHNAKTKPCEEQ |
| | | YGSTYRCVSVLTVLHQDWLNGKEYKCKVSNKALPAPIEKTIS |
| | | KAKGQPREPQVYTLPPSREEMTKNQVSLTCLVKGFYPSDIAVE |
| | | WESNGQPENNYKTTPPVLDSDGSFFLYSKLTVDKSRWQQGN |
| | | VFSCSVMHEALHNHYTQKSLSLSPGK |

MA 03-E11 AS scFab × I2C × scFc

| | | |
|---|---|---|
| 320 | VH-CH1 | EVQLLESGGGLVQPGGSLRLSCAASGFTFSSHAMSWVRQAPG |
| | | KGLEWVSAISGSGGGTYNAASVKGRFTISRDNSKNTLYLQMN |
| | | SLRAEDTAAYYCVTGKGVHLGFDYWGQGTLVTVSSASTKGP |
| | | SVFPLAPSSKSTSGGTAALGCLVKDYFPEPVTVSWNSGALTSG |
| | | VHTFPAVLQSSGLYSLSSVVTVPSSSLGTQTYICNVNHKPSNT |
| | | KVDKKVEPKSC |
| 321 | VL-CL | SYVLTQPPSVSVAPGQTARITCGGNNIGSKSVHWYQQKPGQA |
| | | PVMVVYDDNDRPSGIPERFSGSNSGNTATLTISRVEAGDEADY |
| | | YCQVWDYYSNRAVFGGGTKLTVLGQPKAAPSVTLFPPSSEEL |
| | | QANKATLVCLISDFYPGAVTVAWKADSSPVKAGVETTTPSKQ |
| | | SNNKYAASSYLSLTPEQWKSHKSYSCQVTHEGSTVEKTVAPT |
| | | ECS |
| 322 | scFab | EVQLLESGGGLVQPGGSLRLSCAASGFTFSSHAMSWVRQAPG |
| | | KGLEWVSAISGSGGGTYNAASVKGRFTISRDNSKNTLYLQMN |
| | | SLRAEDTAAYYCVTGKGVHLGFDYWGQGTLVTVSSASTKGP |
| | | SVFPLAPSSKSTSGGTAALGCLVKDYFPEPVTVSWNSGALTSG |
| | | VHTFPAVLQSSGLYSLSSVVTVPSSSLGTQTYICNVNHKPSNT |
| | | KVDKKVEPKSCGGGGSGGGGSGGGGSGGGGSGGGGSGGGG |
| | | SGGGGSGGGGSSYVLTQPPSVSVAPGQTARITCGGNNIGSKSV |
| | | HWYQQKPGQAPVMVVYDDNDRPSGIPERFSGSNSGNTATLTI |
| | | SRVEAGDEADYYCQVWDYYSNRAVFGGGTKLTVLGQPKAA |
| | | PSVTLFPPSSEELQANKATLVCLISDFYPGAVTVAWKADSSPV |
| | | KAGVETTTPSKQSNNKYAASSYLSLTPEQWKSHKSYSCQVTH |
| | | EGSTVEKTVAPTECS |
| 323 | scFab- | EVQLLESGGGLVQPGGSLRLSCAASGFTFSSHAMSWVRQAPG |
| | BISPECIFIC | KGLEWVSAISGSGGGTYNAASVKGRFTISRDNSKNTLYLQMN |
| | MOL. | SLRAEDTAAYYCVTGKGVHLGFDYWGQGTLVTVSSASTKGP |
| | | SVFPLAPSSKSTSGGTAALGCLVKDYFPEPVTVSWNSGALTSG |
| | | VHTFPAVLQSSGLYSLSSVVTVPSSSLGTQTYICNVNHKPSNT |
| | | KVDKKVEPKSCGGGGSGGGGSGGGGSGGGGSGGGGSGGGG |
| | | SGGGGSGGGGSSYVLTQPPSVSVAPGQTARITCGGNNIGSKSV |
| | | HWYQQKPGQAPVMVVYDDNDRPSGIPERFSGSNSGNTATLTI |
| | | SRVEAGDEADYYCQVWDYYSNRAVFGGGTKLTVLGQPKAA |
| | | PSVTLFPPSSEELQANKATLVCLISDFYPGAVTVAWKADSSPV |
| | | KAGVETTTPSKQSNNKYAASSYLSLTPEQWKSHKSYSCQVTH |
| | | EGSTVEKTVAPTECSSGGGGSEVQLVESGGGLVQPGGSLKLS |
| | | CAASGFTFNKYAMNWVRQAPGKGLEWVARIRSKYNNYATY |
| | | YADSVKDRFTISRDDSKNTAYLQMNNLKTEDTAVYYCVRHG |
| | | NFGNSYISYWAYWGQGTLVTVSSGGGGSGGGGSGGGGSQTV |
| | | VTQEPSLTVSPGGTVTLTCGSSTGAVTSGNYPNWVQQKPGQA |
| | | PRGLIGGTKFLAPGTPARFSGSLLGGKAALTLSGVQPEDEAEY |
| | | YCVLWYSNRWVFGGGTKLTVL |
| 324 | scFab-BiTE | EVQLLESGGGLVQPGGSLRLSCAASGFTFSSHAMSWVRQAPG |
| | HLE | KGLEWVSAISGSGGGTYNAASVKGRFTISRDNSKNTLYLQMN |
| | | SLRAEDTAAYYCVTGKGVHLGFDYWGQGTLVTVSSASTKGP |
| | | SVFPLAPSSKSTSGGTAALGCLVKDYFPEPVTVSWNSGALTSG |
| | | VHTFPAVLQSSGLYSLSSVVTVPSSSLGTQTYICNVNHKPSNT |
| | | KVDKKVEPKSCGGGGSGGGGSGGGGSGGGGSGGGGSGGGG |
| | | SGGGGSGGGGSSYVLTQPPSVSVAPGQTARITCGGNNIGSKSV |
| | | HWYQQKPGQAPVMVVYDDNDRPSGIPERFSGSNSGNTATLTI |
| | | SRVEAGDEADYYCQVWDYYSNRAVFGGGTKLTVLGQPKAA |
| | | PSVTLFPPSSEELQANKATLVCLISDFYPGAVTVAWKADSSPV |
| | | KAGVETTTPSKQSNNKYAASSYLSLTPEQWKSHKSYSCQVTH |
| | | EGSTVEKTVAPTECSSGGGGSEVQLVESGGGLVQPGGSLKLS |
| | | CAASGFTFNKYAMNWVRQAPGKGLEWVARIRSKYNNYATY |
| | | YADSVKDRFTISRDDSKNTAYLQMNNLKTEDTAVYYCVRHG |
| | | NFGNSYISYWAYWGQGTLVTVSSGGGGSGGGGSGGGGSQTV |
| | | VTQEPSLTVSPGGTVTLTCGSSTGAVTSGNYPNWVQQKPGQA |
| | | PRGLIGGTKFLAPGTPARFSGSLLGGKAALTLSGVQPEDEAE |
| | | YYCVLWYSNRWVFGGGTKLTVLGGGGDKTHTCPPCPAPELLG |
| | | GPSVFLFPPKPKDTLMISRTPEVTCVVVDVSHEDPEVKFNWY |
| | | VDGVEVHNAKTKPCEEQYGSTYRCVSVLTVLHQDWLNGKEYK |
| | | CKVSNKALPAPIEKTISKAKGQPREPQVYTLPPSREEMTKNQV |
| | | SLTCLVKGFYPSDIAVEWESNGQPENNYKTTPPVLDSDGSFF |
| | | LYSKLTVDKSRWQQGNVFSCSVMHEALHNHYTQKSLSLSPGK |
| | | GGGGSGGGGSGGGGSGGGGSGGGGSGGGGSDKTHTCPPCPAP |
| | | ELLGGPSVFLFPPKPKDTLMISRTPEVTCVVVDVSHEDPEVK |
| | | FNWYVDGVEVHNAKTKPCEEQYGSTYRCVSVLTVLHQDWLNG |
| | | KEYKCKVSNKALPAPIEKTISKAKGQPREPQVYTLPPSREEM |
| | | TKNQVSLTCLVKGFYPSDIAVEWESNGQPENNYKTTPPVLDS |
| | | DGSFFLYSKLTVDKSRWQQGNVFSCSVMHEALHNHYTQKSL |
| | | SLSPGK |

MA 09-F12 CC scFv × I2C × scFc

| | | |
|---|---|---|
| 325 | HCDR1 | THKMGVD |
| 326 | HCDR2 | LIYWNDDKRYSPSLQS |
| 327 | HCDR3 | RRYNWNYENWFDP |
| 328 | LCDR1 | QASQDISNYLN |
| 329 | LCDR2 | AASSLQS |
| 330 | LCDR3 | QQSYYYPTL |
| 331 | VH | QITLKESGPALVKPTQTLTLTCTFSGFSFTTHKMGVDWIRQPP |
| | | GKCLEWLALIYWNDDKRYSPSLQSRLTITKDTSKNQVVLTMT |
| | | NMDPVDTATYYCAYRRYNWNYENWFDPWGQGTLVTVSS |
| 332 | VL | DIQMTQSPSSLSASVGDRVTITCQASQDISNYLNWYQQKPGKA |
| | | PKLLIYAASSLQSGVPSRFSGRGSGTDFTLTISSLQPEDFATY |
| | | YCQQSYYYPTLFGCGTKVEIK |
| 333 | SCFV | QITLKESGPALVKPTQTLTLTCTFSGFSFTTHKMGVDWIRQP |
| | | PGKCLEWLALIYWNDDKRYSPSLQSRLTITKDTSKNQVVLTM |
| | | TNMDPVDTATYYCAYRRYNWNYENWFDPWGQGTLVTVSSGGG |
| | | GSGGGGSGGGGSDIQMTQSPSSLSASVGDRVTITCQASQDIS |
| | | NYLNWYQQKPGKAPKLLIYAASSLQSGVPSRFSGRGSGTDFT |
| | | LTISSLQPEDFATYYCQQSYYYPTLFGCGTKVEIK |
| 334 | BISPECIFIC | QITLKESGPALVKPTQTLTLTCTFSGFSFTTHKMGVDWIRQP |
| | MOL. | PGKCLEWLALIYWNDDKRYSPSLQSRLTITKDTSKNQVVLTM |
| | | TNMDPVDTATYYCAYRRYNWNYENWFDPWGQGTLVTVSSGGG |
| | | GSGGGGSGGGGSDIQMTQSPSSLSASVGDRVTITCQASQDIS |
| | | NYLNWYQQKPGKAPKLLIYAASSLQSGVPSRFSGRGSGTDFT |
| | | LTISSLQPEDFATYYCQQSYYYPTLFGCGTKVEIKSGGGGSE |
| | | VQLVESGGGLVQPGGSLKLSCAASGFTFNKYAMNWVRQAPGK |
| | | GLEWVARIRSKYNNYATYYADSVKDRFTISRDDSKNTAYLQ |
| | | MNNLKTEDTAVYYCVRHGNFGNSYISYWAYWGQGTLVTVS |
| | | SGGGGSGGGGSGGGGSQTVVTQEPSLTVSPGGTVTLTCGSST |
| | | GAVTSGNYPNWVQQKPGQAPRGLIGGTKFLAPGTPARFSGSL |
| | | LGGKAALTLSGVQPEDEAEYYCVLWYSNRWVFGGGTKLTVL |
| 335 | BiTE HLE | QITLKESGPALVKPTQTLTLTCTFSGFSFTTHKMGVDWIRQPP |
| | | GKCLEWLALIYWNDDKRYSPSLQSRLTITKDTSKNQVVLTMT |
| | | NMDPVDTATYYCAYRRYNWNYENWFDPWGQGTLVTVSSGGG |
| | | GSGGGGSGGGGSDIQMTQSPSSLSASVGDRVTITCQASQDIS |
| | | NYLNWYQQKPGKAPKLLIYAASSLQSGVPSRFSGRGSGTDFT |
| | | LTISSLQPEDFATYYCQQSYYYPTLFGCGTKVEIKSGGGGSE |
| | | VQLVESGGGLVQPGGSLKLSCAASGFTFNKYAMNWVRQAPGK |
| | | GLEWVARIRSKYNNYATYYADSVKDRFTISRDDSKNTAYLQ |
| | | MNNLKTEDTAVYYCVRHGNFGNSYISYWAYWGQGTLVTVSS |
| | | GGGGSGGGGSGGGGSQTVVTQEPSLTVSPGGTVTLTCGSST |
| | | GAVTSGNYPNWVQQKPGQAPRGLIGGTKFLAPGTPARFSGS |
| | | LLGGKAALTLSGVQPEDEAEYYCVLWYSNRWVFGGGTKLTV |
| | | LGGGGDKTHTCPPCPAPELLGGPSVFLFPPKPKDTLMISRT |
| | | PEVTCVVVDVSHEDPEVKFNWYVDGVEVHNAKTKPCEEQYGS |
| | | TYRCVSVLTVLHQDWLNGKEYKCKVSNKALPAPIEKTISKAK |
| | | GQPREPQVYTLPPSREEMTKNQVSLTCLVKGFYPSDIAVEWE |
| | | SNGQPENNYKTTPPVLDSDGSFFLYSKLTVDKSRWQQGNVFS |
| | | CSVMHEALHNHYTQKSLSLSPGKGGGGSGGGGSGGGGSGGGG |
| | | SGGGGSGGGGSDKTHTCPPCPAPELLGGPSVFLFPPKPKDTL |
| | | MISRTPEVTCVVVDVSHEDPEVKFNWYVDGVEVHNAKTKPCE |
| | | EQYGSTYRCVSVLTVLHQDWLNGKEYKCKVSNKALPAPIEKT |
| | | ISKAKGQPREPQVYTLPPSREEMTKNQVSLTCLVKGFYPSDI |
| | | AVEWESNGQPENNYKTTPPVLDSDGSFFLYSKLTVDKSRWQQ |
| | | GNVFSCSVMHEALHNHYTQKSLSLSPGK |

CCR8 TCE

| | | |
|---|---|---|
| 336 | CCR8 TCE | KSSQSVLYSSNNX₁NYLA; X₁ is K or R |
| | LCDR1 | |
| | consensus | |

MA 09-F12 scFab × I2C × scFc

| | | |
|---|---|---|
| 337 | VH-CH1 | QITLKESGPALVKPTQTLTLTCTFSGFSFTTHKMGVDWIRQPP |
| | | GKALEWLALIYWNDDKRYSPSLQSRLTITKDTSKNQVVLTMT |
| | | NMDPVDTATYYCAYRRYNWNYENWFDPWGQGTLVTVSSAS |
| | | TKGPSVFPLAPSSKSTSGGTAALGCLVKDYFPEPVTVSWNSGA |
| | | LTSGVHTFPAVLQSSGLYSLSSVVTVPSSSLGTQTYICNVNHKP |
| | | SNTKVDKKVEPKSC |
| 338 | VL-CL | DIQMTQSPSSLSASVGDRVTITCQASQDISNYLNWYQQKPGK |
| | | APKLLIYAASSLQSGVPSRFSGRGSGTDFTLTISSLQPEDFATY |
| | | YCQQSYYYPTLFGPGTKVEIKRTVAAPSVFIFPPSDEQLKSGTA |
| | | SVVCLLNNFYPREAKVQWKVDNALQSGNSQESVTEQDSKDS |
| | | TYSLSSTLTLSKADYEKHKVYACEVTHQGLSSPVTKSFNRGEC |
| 339 | scFab | QITLKESGPALVKPTQTLTLTCTFSGFSFTTHKMGVDWIRQPP |
| | | GKALEWLALIYWNDDKRYSPSLQSRLTITKDTSKNQVVLTMT |
| | | NMDPVDTATYYCAYRRYNWNYENWFDPWGQGTLVTVSSAS |
| | | TKGPSVFPLAPSSKSTSGGTAALGCLVKDYFPEPVTVSWNSGA |
| | | LTSGVHTFPAVLQSSGLYSLSSVVTVPSSSLGTQTYICNVNHKP |
| | | SNTKVDKKVEPKSCGGGGSGGGGSGGGGSGGGGSGGGGSGG |
| | | GGSGGGGSGGGGSDIQMTQSPSSLSASVGDRVTITCQASQDIS |
| | | NYLNWYQQKPGKAPKLLIYAASSLQSGVPSRFSGRGSGTDFT |
| | | LTISSLQPEDFATYYCQQSYYYPTLFGPGTKVEIKRTVAAPSVF |
| | | IFPPSDEQLKSGTASVVCLLNNFYPREAKVQWKVDNALQSGN |
| | | SQESVTEQDSKDSTYSLSSTLTLSKADYEKHKVYACEVTHQG |
| | | LSSPVTKSFNRGEC |
| 340 | scFab- | QITLKESGPALVKPTQTLTLTCTFSGFSFTTHKMGVDWIRQPP |
| | BISPECIFIC | GKALEWLALIYWNDDKRYSPSLQSRLTITKDTSKNQVVLTMT |
| | MOL. | NMDPVDTATYYCAYRRYNWNYENWFDPWGQGTLVTVSSAS |
| | | TKGPSVFPLAPSSKSTSGGTAALGCLVKDYFPEPVTVSWNSGA |
| | | LTSGVHTFPAVLQSSGLYSLSSVVTVPSSSLGTQTYICNVNHKP |
| | | SNTKVDKKVEPKSCGGGGSGGGGSGGGGSGGGGSGGGGSGG |
| | | GGSGGGGSGGGGSDIQMTQSPSSLSASVGDRVTITCQASQDIS |
| | | NYLNWYQQKPGKAPKLLIYAASSLQSGVPSRFSGRGSGTDFT |
| | | LTISSLQPEDFATYYCQQSYYYPTLFGPGTKVEIKRTVAAPSVF |
| | | IFPPSDEQLKSGTASVVCLLNNFYPREAKVQWKVDNALQSGN |
| | | SQESVTEQDSKDSTYSLSSTLTLSKADYEKHKVYACEVTHQG |
| | | LSSPVTKSFNRGECSGGGGSEVQLVESGGGLVQPGGSLKLSCA |
| | | ASGFTFNKYAMNWVRQAPGKGLEWVARIRSKYNNYATYYA |
| | | DSVKDRFTISRDDSKNTAYLQMNNLKTEDTAVYYCVRHGNF |
| | | GNSYISYWAYWGQGTLVTVSSGGGGSGGGGSGGGGSQTVVT |
| | | QEPSLTVSPGGTVTLTCGSSTGAVTSGNYPNWVQQKPGQAPR |
| | | GLIGGTKFLAPGTPARFSGSLLGGKAALTLSGVQPEDEAEYYC |
| | | VLWYSNRWVFGGGTKLTVL |
| 341 | scFab-BiTE | QITLKESGPALVKPTQTLTLTCTFSGFSFTTHKMGVDWIRQPP |
| | HLE | GKALEWLALIYWNDDKRYSPSLQSRLTITKDTSKNQVVLTMT |
| | | NMDPVDTATYYCAYRRYNWNYENWFDPWGQGTLVTVSSAS |
| | | TKGPSVFPLAPSSKSTSGGTAALGCLVKDYFPEPVTVSWNSGA |
| | | LTSGVHTFPAVLQSSGLYSLSSVVTVPSSSLGTQTYICNVNHKP |
| | | SNTKVDKKVEPKSCGGGGSGGGGSGGGGSGGGGSGGGGSGG |
| | | GGSGGGGSGGGGSDIQMTQSPSSLSASVGDRVTITCQASQDIS |
| | | NYLNWYQQKPGKAPKLLIYAASSLQSGVPSRFSGRGSGTDFT |
| | | LTISSLQPEDFATYYCQQSYYYPTLFGPGTKVEIKRTVAAPSVF |
| | | IFPPSDEQLKSGTASVVCLLNNFYPREAKVQWKVDNALQSGN |
| | | SQESVTEQDSKDSTYSLSSTLTLSKADYEKHKVYACEVTHQG |
| | | LSSPVTKSFNRGECSGGGGSEVQLVESGGGLVQPGGSLKLSCA |
| | | ASGFTFNKYAMNWVRQAPGKGLEWVARIRSKYNNYATYYA |
| | | DSVKDRFTISRDDSKNTAYLQMNNLKTEDTAVYYCVRHGNF |
| | | GNSYISYWAYWGQGTLVTVSSGGGGSGGGGSGGGGSQTVVT |
| | | QEPSLTVSPGGTVTLTCGSSTGAVTSGNYPNWVQQKPGQAPR |
| | | GLIGGTKFLAPGTPARFSGSLLGGKAALTLSGVQPEDEAEYYC |
| | | VLWYSNRWVFGGGTKLTVLGGGGDKTHTCPPCPAPELLGGP |
| | | SVFLFPPKPKDTLMISRTPEVTCVVVDVSHEDPEVKFNWYVD |
| | | GVEVHNAKTKPCEEQYGSTYRCVSVLTVLHQDWLNGKEYKC |
| | | KVSNKALPAPIEKTISKAKGQPREPQVYTLPPSREEMTKNQVS |
| | | LTCLVKGFYPSDIAVEWESNGQPENNYKTTPPVLDSDGSFFLY |
| | | SKLTVDKSRWQQGNVFSCSVMHEALHNHYTQKSLSLSPGKG |
| | | GGGSGGGGSGGGGSGGGGSGGGGSGGGGSDKTHTCPPCPAP |
| | | ELLGGPSVFLFPPKPKDTLMISRTPEVTCVVVDVSHEDPEVKF |
| | | NWYVDGVEVHNAKTKPCEEQYGSTYRCVSVLTVLHQDWLN |
| | | GKEYKCKVSNKALPAPIEKTISKAKGQPREPQVYTLPPSREEM |
| | | TKNQVSLTCLVKGFYPSDIAVEWESNGQPENNYKTTPPVLDS |
| | | DGSFFLYSKLTVDKSRWQQGNVFSCSVMHEALHNHYTQKSL |
| | | SLSPGK |

CCR8 TCE

| | | |
|---|---|---|
| 342 | VL | DIVMTQSPDSLAVSLGERATINCKSSQSVLYSSNNX₁NYLAWY |
| | consensus | X₂QKPGQX₃PKLLISWASTRESGVPDRFSGSGSGTDFTLTINSL |
| | | QAEDVAVYYCQQYYSIPITFGGGTKVEIKR, |
| | | wherein X₁ is K or |
| | | R, X₂ is H or Q, and/or X₃ is S or P |

MA 09-G10 CC scFv × I2C × scFc

| | | |
|---|---|---|
| 343 | HCDR1 | THKMGVD |
| 344 | HCDR2 | GIHIYDDKRYSPSLQS |
| 345 | HCDR3 | RRYNWNYENWFDP |
| 346 | LCDR1 | QASQDISNYFN |
| 347 | LCDR2 | AASSLQS |
| 348 | LCDR3 | QQSYITPFT |
| 349 | VH | QITLKESGPTLVKPTQTLTLTCTFSGFSFTTHKMGVDWIRQPPG |
| | | KCLEWLAGIHIYDDKRYSPSLQSRLTITKDTSKNQVVLTMTN |
| | | MDPVDTATYYCAYRRYNWNYENWFDPWGQGTLVTVSS |
| 350 | VL | DIQMTQSPSSLSASVGDRVTITCQASQDISNYFNWYQQKPGKA |
| | | PKLLIYAASSLQSGVPSRFSGSGSGTDFTLTISSLQPEDFATYYC |
| | | QQSYITPFTFGCGTKVEIK |
| 351 | SCFV | QITLKESGPTLVKPTQTLTLTCTFSGFSFTTHKMGVDWIRQPPG |
| | | KCLEWLAGIHIYDDKRYSPSLQSRLTITKDTSKNQVVLTMTN |
| | | MDPVDTATYYCAYRRYNWNYENWFDPWGQGTLVTVSSGGG |
| | | GSGGGGSGGGGSDIQMTQSPSSLSASVGDRVTITCQASQDISN |
| | | YFNWYQQKPGKAPKLLIYAASSLQSGVPSRFSGSGSGTDFTLT |
| | | ISSLQPEDFATYYCQQSYITPFTFGCGTKVEIK |
| 352 | BISPECIFIC | QITLKESGPTLVKPTQTLTLTCTFSGFSFTTHKMGVDWIRQPPG |
| | MOL. | KCLEWLAGIHIYDDKRYSPSLQSRLTITKDTSKNQVVLTMTN |
| | | MDPVDTATYYCAYRRYNWNYENWFDPWGQGTLVTVSSGGG |
| | | GSGGGGSGGGGSDIQMTQSPSSLSASVGDRVTITCQASQDISN |
| | | YFNWYQQKPGKAPKLLIYAASSLQSGVPSRFSGSGSGTDFTLT |
| | | ISSLQPEDFATYYCQQSYITPFTFGCGTKVEIKSGGGGSEVQLV |
| | | ESGGGLVQPGGSLKLSCAASGFTFNKYAMNWVRQAPGKGLE |
| | | WVARIRSKYNNYATYYADSVKDRFTISRDDSKNTAYLQMNN |
| | | LKTEDTAVYYCVRHGNFGNSYISYWAYWGQGTLVTVSSGGG |
| | | GSGGGGSGGGGSQTVVTQEPSLTVSPGGTVTLTCGSSTGAVT |
| | | SGNYPNWVQQKPGQAPRGLIGGTKFLAPGTPARFSGSLLGGK |
| | | AALTLSGVQPEDEAEYYCVLWYSNRWVFGGGTKLTVL |
| 353 | BiTE HLE | QITLKESGPTLVKPTQTLTLTCTFSGFSFTTHKMGVDWIRQPPG |
| | | KCLEWLAGIHIYDDKRYSPSLQSRLTITKDTSKNQVVLTMTN |
| | | MDPVDTATYYCAYRRYNWNYENWFDPWGQGTLVTVSSGGG |
| | | GSGGGGSGGGGSDIQMTQSPSSLSASVGDRVTITCQASQDISN |
| | | YFNWYQQKPGKAPKLLIYAASSLQSGVPSRFSGSGSGTDFTLT |
| | | ISSLQPEDFATYYCQQSYITPFTFGCGTKVEIKSGGGGSEVQLV |
| | | ESGGGLVQPGGSLKLSCAASGFTFNKYAMNWVRQAPGKGLE |
| | | WVARIRSKYNNYATYYADSVKDRFTISRDDSKNTAYLQMNN |
| | | LKTEDTAVYYCVRHGNFGNSYISYWAYWGQGTLVTVSSGGG |
| | | GSGGGGSGGGGSQTVVTQEPSLTVSPGGTVTLTCGSSTGAVT |
| | | SGNYPNWVQQKPGQAPRGLIGGTKFLAPGTPARFSGSLLGGK |
| | | AALTLSGVQPEDEAEYYCVLWYSNRWVFGGGTKLTVLGGGG |
| | | DKTHTCPPCPAPELLGGPSVFLFPPKPKDTLMISRTPEVTCVVV |
| | | DVSHEDPEVKFNWYVDGVEVHNAKTKPCEEQYGSTYRCVSV |
| | | LTVLHQDWLNGKEYKCKVSNKALPAPIEKTISKAKGQPREPQ |
| | | VYTLPPSREEMTKNQVSLTCLVKGFYPSDIAVEWESNGQPEN |
| | | NYKTTPPVLDSDGSFFLYSKLTVDKSRWQQGNVFSCSVMHEA |
| | | LHNHYTQKSLSLSPGKGGGGSGGGGSGGGGSGGGGSGGGGS |
| | | GGGGSDKTHTCPPCPAPELLGGPSVFLFPPKPKDTLMISRTPEV |
| | | TCVVVDVSHEDPEVKFNWYVDGVEVHNAKTKPCEEQYGSTY |
| | | RCVSVLTVLHQDWLNGKEYKCKVSNKALPAPIEKTISKAKGQ |
| | | PREPQVYTLPPSREEMTKNQVSLTCLVKGFYPSDIAVEWESNG |
| | | QPENNYKTTPPVLDSDGSFFLYSKLTVDKSRWQQGNVFSCSV |
| | | MHEALHNHYTQKSLSLSPGK |

MA 09-G10 scFab × I2C × scFc

| | | |
|---|---|---|
| 354 | VH-CH1 | QITLKESGPTLVKPTQTLTLTCTFSGFSFTTHKMGVDWIRQPPG |
| | | KALEWLAGIHIYDDKRYSPSLQSRLTITKDTSKNQVVLTMTN |
| | | MDPVDTATYYCAYRRYNWNYENWFDPWGQGTLVTVSSAST |
| | | KGPSVFPLAPSSKSTSGGTAALGCLVKDYFPEPVTVSWNSGAL |
| | | TSGVHTFPAVLQSSGLYSLSSVVTVPSSSLGTQTYICNVNHKPS |
| | | NTKVDKKVEPKSC |
| 355 | VL-CL | DIQMTQSPSSLSASVGDRVTITCQASQDISNYFNWYQQKPGKA |
| | | PKLLIYAASSLQSGVPSRFSGSGSGTDFTLTISSLQPEDFATYYC |
| | | QQSYITPFTFGPGTKVEIKRTVAAPSVFIFPPSDEQLKSGTASVV |
| | | CLLNNFYPREAKVQWKVDNALQSGNSQESVTEQDSKDSTYS |
| | | LSSTLTLSKADYEKHKVYACEVTHQGLSSPVTKSFNRGEC |
| 356 | scFab | QITLKESGPTLVKPTQTLTLTCTFSGFSFTTHKMGVDWIRQPPG |
| | | KALEWLAGIHIYDDKRYSPSLQSRLTITKDTSKNQVVLTMTN |
| | | MDPVDTATYYCAYRRYNWNYENWFDPWGQGTLVTVSSAST |
| | | KGPSVFPLAPSSKSTSGGTAALGCLVKDYFPEPVTVSWNSGAL |
| | | TSGVHTFPAVLQSSGLYSLSSVVTVPSSSLGTQTYICNVNHKPS |
| | | NTKVDKKVEPKSCGGGGSGGGGSGGGGSGGGGSGGGGSGG |
| | | GGSGGGGSGGGGSDIQMTQSPSSLSASVGDRVTITCQASQDIS |
| | | NYFNWYQQKPGKAPKLLIYAASSLQSGVPSRFSGSGSGTDFTL |
| | | TISSLQPEDFATYYCQQSYITPFTFGPGTKVEIKRTVAAPSVFIF |
| | | PPSDEQLKSGTASVVCLLNNFYPREAKVQWKVDNALQSGNS |
| | | QESVTEQDSKDSTYSLSSTLTLSKADYEKHKVYACEVTHQGL |
| | | SSPVTKSFNRGEC |
| 357 | scFab- | QITLKESGPTLVKPTQTLTLTCTFSGFSFTTHKMGVDWIRQPPG |
| | BISPECIFIC | KALEWLAGIHIYDDKRYSPSLQSRLTITKDTSKNQVVLTMTN |
| | MOL. | MDPVDTATYYCAYRRYNWNYENWFDPWGQGTLVTVSSAST |
| | | KGPSVFPLAPSSKSTSGGTAALGCLVKDYFPEPVTVSWNSGAL |
| | | TSGVHTFPAVLQSSGLYSLSSVVTVPSSSLGTQTYICNVNHKPS |
| | | NTKVDKKVEPKSCGGGGSGGGGSGGGGSGGGGSGGGGSGG |
| | | GGSGGGGSGGGGSDIQMTQSPSSLSASVGDRVTITCQASQDIS |
| | | NYFNWYQQKPGKAPKLLIYAASSLQSGVPSRFSGSGSGTDFTL |
| | | TISSLQPEDFATYYCQQSYITPFTFGPGTKVEIKRTVAAPSVFIF |
| | | PPSDEQLKSGTASVVCLLNNFYPREAKVQWKVDNALQSGNS |
| | | QESVTEQDSKDSTYSLSSTLTLSKADYEKHKVYACEVTHQGL |
| | | SSPVTKSFNRGECSGGGGSEVQLVESGGGLVQPGGSLKLSCA |
| | | ASGFTFNKYAMNWVRQAPGKGLEWVARIRSKYNNYATYYA |
| | | DSVKDRFTISRDDSKNTAYLQMNNLKTEDTAVYYCVRHGNF |
| | | GNSYISYWAYWGQGTLVTVSSGGGGSGGGGSGGGGSQTVVT |
| | | QEPSLTVSPGGTVTLTCGSSTGAVTSGNYPNWVQQKPGQAPR |
| | | GLIGGTKFLAPGTPARFSGSLLGGKAALTLSGVQPEDEAEYYC |
| | | VLWYSNRWVFGGGTKLTVL |
| 358 | scFab-BiTE | QITLKESGPTLVKPTQTLTLTCTFSGFSFTTHKMGVDWIRQPPG |
| | HLE | KALEWLAGIHIYDDKRYSPSLQSRLTITKDTSKNQVVLTMTN |
| | | MDPVDTATYYCAYRRYNWNYENWFDPWGQGTLVTVSSAST |
| | | KGPSVFPLAPSSKSTSGGTAALGCLVKDYFPEPVTVSWNSGAL |
| | | TSGVHTFPAVLQSSGLYSLSSVVTVPSSSLGTQTYICNVNHKPS |
| | | NTKVDKKVEPKSCGGGGSGGGGSGGGGSGGGGSGGGGSGG |
| | | GGSGGGGSGGGGSDIQMTQSPSSLSASVGDRVTITCQASQDIS |
| | | NYFNWYQQKPGKAPKLLIYAASSLQSGVPSRFSGSGSGTDFTL |
| | | TISSLQPEDFATYYCQQSYITPFTFGPGTKVEIKRTVAAPSVFIF |
| | | PPSDEQLKSGTASVVCLLNNFYPREAKVQWKVDNALQSGNS |
| | | QESVTEQDSKDSTYSLSSTLTLSKADYEKHKVYACEVTHQGL |
| | | SSPVTKSFNRGECSGGGGSEVQLVESGGGLVQPGGSLKLSCA |
| | | ASGFTFNKYAMNWVRQAPGKGLEWVARIRSKYNNYATYYA |
| | | DSVKDRFTISRDDSKNTAYLQMNNLKTEDTAVYYCVRHGNF |
| | | GNSYISYWAYWGQGTLVTVSSGGGGSGGGGSGGGGSQTVVT |
| | | QEPSLTVSPGGTVTLTCGSSTGAVTSGNYPNWVQQKPGQAPR |
| | | GLIGGTKFLAPGTPARFSGSLLGGKAALTLSGVQPEDEAEYYC |
| | | VLWYSNRWVFGGGTKLTVLGGGGDKTHTCPPCPAPELLGGP |
| | | SVFLFPPKPKDTLMISRTPEVTCVVVDVSHEDPEVKFNWYVD |
| | | GVEVHNAKTKPCEEQYGSTYRCVSVLTVLHQDWLNGKEYKC |
| | | KVSNKALPAPIEKTISKAKGQPREPQVYTLPPSREEMTKNQVS |
| | | LTCLVKGFYPSDIAVEWESNGQPENNYKTTPPVLDSDGSFFLY |
| | | SKLTVDKSRWQQGNVFSCSVMHEALHNHYTQKSLSLSPGKG |
| | | GGGSGGGGSGGGGSGGGGSGGGGSGGGGSDKTHTCPPCPAP |
| | | ELLGGPSVFLFPPKPKDTLMISRTPEVTCVVVDVSHEDPEVKF |
| | | NWYVDGVEVHNAKTKPCEEQYGSTYRCVSVLTVLHQDWLN |
| | | GKEYKCKVSNKALPAPIEKTISKAKGQPREPQVYTLPPSREEM |
| | | TKNQVSLTCLVKGFYPSDIAVEWESNGQPENNYKTTPPVLDS |
| | | DGSFFLYSKLTVDKSRWQQGNVFSCSVMHEALHNHYTQKSL |
| | | SLSPGK |

MA 09-H7 CC scFv × I2C × scFc

| | | |
|---|---|---|
| 359 | HCDR1 | THKMGVD |
| 360 | HCDR2 | LIYWNDDKRYSPSLQS |
| 361 | HCDR3 | RRYNWNYENWFDP |
| 362 | LCDR1 | QASQDISNYLN |
| 363 | LCDR2 | AASSLQS |
| 364 | LCDR3 | QQSYFPVVE |
| 365 | VH | QITLKESGPALVKPTQTLTLTCTFSGFSFTTHKMGVDWIRQPP |
| | | GKCLEWLALIYWNDDKRYSPSLQSRLTITKDTSKNQVVLTMT |
| | | NMDPVDTATYYCAYRRYNWNYENWFDPWGQGTLVTVSS |
| 366 | VL | DIQMTQSPSSLSASVGDRVTITCQASQDISNYLNWYQQKPGKA |
| | | PKLLIYAASSLQSGVPSRFSGSGSGTDFTLTISSLQPEDFATY |
| | | YCQQSYFPVVEFGCGTKVEIK |
| 367 | SCFV | QITLKESGPALVKPTQTLTLTCTFSGFSFTTHKMGVDWIRQPP |
| | | GKCLEWLALIYWNDDKRYSPSLQSRLTITKDTSKNQVVLTMT |
| | | NMDPVDTATYYCAYRRYNWNYENWFDPWGQGTLVTVSSGG |
| | | GGSGGGGSGGGGSDIQMTQSPSSLSASVGDRVTITCQASQDIS |
| | | NYLNWYQQKPGKAPKLLIYAASSLQSGVPSRFSGSGSGTDFTL |
| | | TISSLQPEDFATYYCQQSYFPVVEFGCGTKVEIK |
| 368 | BISPECIFIC | QITLKESGPALVKPTQTLTLTCTFSGFSFTTHKMGVDWIRQPP |
| | MOL. | GKCLEWLALIYWNDDKRYSPSLQSRLTITKDTSKNQVVLTMT |
| | | NMDPVDTATYYCAYRRYNWNYENWFDPWGQGTLVTVSSGG |
| | | GGSGGGGSGGGGSDIQMTQSPSSLSASVGDRVTITCQASQDIS |
| | | NYLNWYQQKPGKAPKLLIYAASSLQSGVPSRFSGSGSGTDFTL |
| | | TISSLQPEDFATYYCQQSYFPVVEFGCGTKVEIKSGGGGSEVQ |
| | | LVESGGGLVQPGGSLKLSCAASGFTFNKYAMNWVRQAPGKG |
| | | LEWVARIRSKYNNYATYYADSVKDRFTISRDDSKNTAYLQM |
| | | NNLKTEDTAVYYCVRHGNFGNSYISYWAYWGQGTLVTVSSG |
| | | GGGSGGGGSGGGGSQTVVTQEPSLTVSPGGTVTLTCGSSTGA |
| | | VTSGNYPNWVQQKPGQAPRGLIGGTKFLAPGTPARFSGSLLG |
| | | GKAALTLSGVQPEDEAEYYCVLWYSNRWVFGGGTKLTVL |
| 369 | BiTE HLE | QITLKESGPALVKPTQTLTLTCTFSGFSFTTHKMGVDWIRQPP |
| | | GKCLEWLALIYWNDDKRYSPSLQSRLTITKDTSKNQVVLTMT |
| | | NMDPVDTATYYCAYRRYNWNYENWFDPWGQGTLVTVSSGG |
| | | GGSGGGGSGGGGSDIQMTQSPSSLSASVGDRVTITCQASQDIS |
| | | NYLNWYQQKPGKAPKLLIYAASSLQSGVPSRFSGSGSGTDFTL |
| | | TISSLQPEDFATYYCQQSYFPVVEFGCGTKVEIKSGGGGSEVQ |
| | | LVESGGGLVQPGGSLKLSCAASGFTFNKYAMNWVRQAPGKG |
| | | LEWVARIRSKYNNYATYYADSVKDRFTISRDDSKNTAYLQM |
| | | NNLKTEDTAVYYCVRHGNFGNSYISYWAYWGQGTLVTVSSG |
| | | GGGSGGGGSGGGGSQTVVTQEPSLTVSPGGTVTLTCGSSTGA |
| | | VTSGNYPNWVQQKPGQAPRGLIGGTKFLAPGTPARFSGSLLG |
| | | GKAALTLSGVQPEDEAEYYCVLWYSNRWVFGGGTKLTVLGG |
| | | GGDKTHTCPPCPAPELLGGPSVFLFPPKPKDTLMISRTPEVTCV |
| | | VVDVSHEDPEVKFNWYVDGVEVHNAKTKPCEEQYGSTYRCV |
| | | SVLTVLHQDWLNGKEYKCKVSNKALPAPIEKTISKAKGQPRE |
| | | PQVYTLPPSREEMTKNQVSLTCLVKGFYPSDIAVEWESNGQPE |
| | | NNYKTTPPVLDSDGSFFLYSKLTVDKSRWQQGNVFSCSVMHE |
| | | ALHNHYTQKSLSLSPGKGGGGSGGGGSGGGGSGGGGSGGGG |
| | | SGGGGSDKTHTCPPCPAPELLGGPSVFLFPPKPKDTLMISRTPE |
| | | VTCVVVDVSHEDPEVKFNWYVDGVEVHNAKTKPCEEQYGST |
| | | YRCVSVLTVLHQDWLNGKEYKCKVSNKALPAPIEKTISKAKG |
| | | QPREPQVYTLPPSREEMTKNQVSLTCLVKGFYPSDIAVEWESN |
| | | GQPENNYKTTPPVLDSDGSFFLYSKLTVDKSRWQQGNVFSCS |
| | | VMHEALHNHYTQKSLSLSPGK |

MA 09-H7 scFab × I2C × scFc

| | | |
|---|---|---|
| 370 | VH-CH1 | QITLKESGPALVKPTQTLTLTCTFSGFSFTTHKMGVDWIRQPP |
| | | GKALEWLALIYWNDDKRYSPSLQSRLTITKDTSKNQVVLTMT |
| | | NMDPVDTATYYCAYRRYNWNYENWFDPWGQGTLVTVSSAS |
| | | TKGPSVFPLAPSSKSTSGGTAALGCLVKDYFPEPVTVSWNSGA |
| | | LTSGVHTFPAVLQSSGLYSLSSVVTVPSSSLGTQTYICNVNHKP |
| | | SNTKVDKKVEPKSC |
| 371 | VL-CL | DIQMTQSPSSLSASVGDRVTITCQASQDISNYLNWYQQKPGK |
| | | APKLLIYAASSLQSGVPSRFSGSGSGTDFTLTISSLQPEDFATYY |
| | | CQQSYFPVVEFGPGTKVEIKRTVAAPSVFIFPPSDEQLKSGTAS |
| | | VVCLLNNFYPREAKVQWKVDNALQSGNSQESVTEQDSKDST |
| | | YSLSSTLTLSKADYEKHKVYACEVTHQGLSSPVTKSFNRGEC |
| 372 | scFab | QITLKESGPALVKPTQTLTLTCTFSGFSFTTHKMGVDWIRQPP |
| | | GKALEWLALIYWNDDKRYSPSLQSRLTITKDTSKNQVVLTMT |
| | | NMDPVDTATYYCAYRRYNWNYENWFDPWGQGTLVTVSSAS |
| | | TKGPSVFPLAPSSKSTSGGTAALGCLVKDYFPEPVTVSWNSGA |
| | | LTSGVHTFPAVLQSSGLYSLSSVVTVPSSSLGTQTYICNVNHKP |
| | | SNTKVDKKVEPKSCGGGGSGGGGSGGGGSGGGGSGGGGSGG |
| | | GGSGGGGSGGGGSDIQMTQSPSSLSASVGDRVTITCQASQDIS |
| | | NYLNWYQQKPGKAPKLLIYAASSLQSGVPSRFSGSGSGTDFTL |
| | | TISSLQPEDFATYYCQQSYFPVVEFGPGTKVEIKRTVAAPSVFI |
| | | FPPSDEQLKSGTASVVCLLNNFYPREAKVQWKVDNALQSGNS |
| | | QESVTEQDSKDSTYSLSSTLTLSKADYEKHKVYACEVTHQGL |
| | | SSPVTKSFNRGEC |
| 373 | scFab- | QITLKESGPALVKPTQTLTLTCTFSGFSFTTHKMGVDWIRQPP |
| | BISPECIFIC | GKALEWLALIYWNDDKRYSPSLQSRLTITKDTSKNQVVLTMT |
| | MOL. | NMDPVDTATYYCAYRRYNWNYENWFDPWGQGTLVTVSSAS |
| | | TKGPSVFPLAPSSKSTSGGTAALGCLVKDYFPEPVTVSWNSGA |
| | | LTSGVHTFPAVLQSSGLYSLSSVVTVPSSSLGTQTYICNVNHKP |
| | | SNTKVDKKVEPKSCGGGGSGGGGSGGGGSGGGGSGGGGSGG |
| | | GGSGGGGSGGGGSDIQMTQSPSSLSASVGDRVTITCQASQDIS |
| | | NYLNWYQQKPGKAPKLLIYAASSLQSGVPSRFSGSGSGTDFTL |
| | | TISSLQPEDFATYYCQQSYFPVVEFGPGTKVEIKRTVAAPSVFI |
| | | FPPSDEQLKSGTASVVCLLNNFYPREAKVQWKVDNALQSGNS |
| | | QESVTEQDSKDSTYSLSSTLTLSKADYEKHKVYACEVTHQGL |
| | | SSPVTKSFNRGECSGGGGSEVQLVESGGGLVQPGGSLKLSCA |
| | | ASGFTFNKYAMNWVRQAPGKGLEWVARIRSKYNNYATYYA |
| | | DSVKDRFTISRDDSKNTAYLQMNNLKTEDTAVYYCVRHGNF |
| | | GNSYISYWAYWGQGTLVTVSSGGGGSGGGGSGGGGSQTVVT |
| | | QEPSLTVSPGGTVTLTCGSSTGAVTSGNYPNWVQQKPGQAPR |
| | | GLIGGTKFLAPGTPARFSGSLLGGKAALTLSGVQPEDEAEYYC |
| | | VLWYSNRWVFGGGTKLTVL |
| 374 | scFab-BiTE | QITLKESGPALVKPTQTLTLTCTFSGFSFTTHKMGVDWIRQPP |
| | HLE | GKALEWLALIYWNDDKRYSPSLQSRLTITKDTSKNQVVLTMT |
| | | NMDPVDTATYYCAYRRYNWNYENWFDPWGQGTLVTVSSAS |
| | | TKGPSVFPLAPSSKSTSGGTAALGCLVKDYFPEPVTVSWNSGA |
| | | LTSGVHTFPAVLQSSGLYSLSSVVTVPSSSLGTQTYICNVNHKP |
| | | SNTKVDKKVEPKSCGGGGSGGGGSGGGGSGGGGSGGGGSGG |
| | | GGSGGGGSGGGGSDIQMTQSPSSLSASVGDRVTITCQASQDIS |
| | | NYLNWYQQKPGKAPKLLIYAASSLQSGVPSRFSGSGSGTDFTL |
| | | TISSLQPEDFATYYCQQSYFPVVEFGPGTKVEIKRTVAAPSVFI |
| | | FPPSDEQLKSGTASVVCLLNNFYPREAKVQWKVDNALQSGNS |
| | | QESVTEQDSKDSTYSLSSTLTLSKADYEKHKVYACEVTHQGL |
| | | SSPVTKSFNRGECSGGGGSEVQLVESGGGLVQPGGSLKLSCA |
| | | ASGFTFNKYAMNWVRQAPGKGLEWVARIRSKYNNYATYYA |
| | | DSVKDRFTISRDDSKNTAYLQMNNLKTEDTAVYYCVRHGNF |
| | | GNSYISYWAYWGQGTLVTVSSGGGGSGGGGSGGGGSQTVVT |
| | | QEPSLTVSPGGTVTLTCGSSTGAVTSGNYPNWVQQKPGQAPR |
| | | GLIGGTKFLAPGTPARFSGSLLGGKAALTLSGVQPEDEAEYYC |
| | | VLWYSNRWVFGGGTKLTVLGGGGDKTHTCPPCPAPELLGGP |
| | | SVFLFPPKPKDTLMISRTPEVTCVVVDVSHEDPEVKFNWYVD |
| | | GVEVHNAKTKPCEEQYGSTYRCVSVLTVLHQDWLNGKEYKC |
| | | KVSNKALPAPIEKTISKAKGQPREPQVYTLPPSREEMTKNQVS |
| | | LTCLVKGFYPSDIAVEWESNGQPENNYKTTPPVLDSDGSFFLY |
| | | SKLTVDKSRWQQGNVFSCSVMHEALHNHYTQKSLSLSPGKG |
| | | GGGSGGGGSGGGGSGGGGSGGGGSGGGGSDKTHTCPPCPAP |
| | | ELLGGPSVFLFPPKPKDTLMISRTPEVTCVVVDVSHEDPEVKF |
| | | NWYVDGVEVHNAKTKPCEEQYGSTYRCVSVLTVLHQDWLN |
| | | GKEYKCKVSNKALPAPIEKTISKAKGQPREPQVYTLPPSREEM |
| | | TKNQVSLTCLVKGFYPSDIAVEWESNGQPENNYKTTPPVLDS |
| | | DGSFFLYSKLTVDKSRWQQGNVFSCSVMHEALHNHYTQKSL |
| | | SLSPGK |

MA 09-H10 CC scFv × I2C × scFc

| | | |
|---|---|---|
| 375 | HCDR1 | THKMGVD |
| 376 | HCDR2 | LIYWNDDKRYSPSLQS |
| 377 | HCDR3 | RRYNWNYENWFDP |
| 378 | LCDR1 | QASQDISNYLN |
| 379 | LCDR2 | AASSLQS |
| 380 | LCDR3 | QQSYTPPTT |
| 381 | VH | QITLKESGPTLVKPTQTLTLTCTFSGFSFTTHKMGVDWIRQPPG |
| | | KCLEWLALIYWNDDKRYSPSLQSRLTITKDTSKNQVVLTMTN |
| | | MDPVDTATYYCAYRRYNWNYENWFDPWGQGTLVTVSS |
| 382 | VL | DIQMTQSPSSLSASVGDRVTITCQASQDISNYLNWYQQKPGK |
| | | APKLLIYAASSLQSGVPSRFSGRGSGTDFTLTISSLQPEDFATY |
| | | YCQQSYTPPTTFGCGTKVEIK |
| 383 | SCFV | QITLKESGPTLVKPTQTLTLTCTFSGFSFTTHKMGVDWIRQPPG |
| | | KCLEWLALIYWNDDKRYSPSLQSRLTITKDTSKNQVVLTMTN |
| | | MDPVDTATYYCAYRRYNWNYENWFDPWGQGTLVTVSSGGG |
| | | GSGGGGSGGGGSDIQMTQSPSSLSASVGDRVTITCQASQDISN |
| | | YLNWYQQKPGKAPKLLIYAASSLQSGVPSRFSGRGSGTDFTLT |
| | | ISSLQPEDFATYYCQQSYTPPTTFGCGTKVEIK |
| 384 | BISPECIFIC | QITLKESGPTLVKPTQTLTLTCTFSGFSFTTHKMGVDWIRQPPG |
| | MOL. | KCLEWLALIYWNDDKRYSPSLQSRLTITKDTSKNQVVLTMTN |
| | | MDPVDTATYYCAYRRYNWNYENWFDPWGQGTLVTVSSGGG |
| | | GSGGGGSGGGGSDIQMTQSPSSLSASVGDRVTITCQASQDISN |
| | | YLNWYQQKPGKAPKLLIYAASSLQSGVPSRFSGRGSGTDFTLT |
| | | ISSLQPEDFATYYCQQSYTPPTTFGCGTKVEIKSGGGGSEVQL |
| | | VESGGGLVQPGGSLKLSCAASGFTFNKYAMNWVRQAPGKGL |
| | | EWVARIRSKYNNYATYYADSVKDRFTISRDDSKNTAYLQMN |
| | | NLKTEDTAVYYCVRHGNFGNSYISYWAYWGQGTLVTVSSGG |
| | | GGSGGGGSGGGGSQTVVTQEPSLTVSPGGTVTLTCGSSTGAV |
| | | TSGNYPNWVQQKPGQAPRGLIGGTKFLAPGTPARFSGSLLGG |
| | | KAALTLSGVQPEDEAEYYCVLWYSNRWVFGGGTKLTVL |
| 385 | BiTE HLE | QITLKESGPTLVKPTQTLTLTCTFSGFSFTTHKMGVDWIRQPPG |
| | | KCLEWLALIYWNDDKRYSPSLQSRLTITKDTSKNQVVLTMTN |
| | | MDPVDTATYYCAYRRYNWNYENWFDPWGQGTLVTVSSGGG |
| | | GSGGGGSGGGGSDIQMTQSPSSLSASVGDRVTITCQASQDISN |
| | | YLNWYQQKPGKAPKLLIYAASSLQSGVPSRFSGRGSGTDFTLT |
| | | ISSLQPEDFATYYCQQSYTPPTTFGCGTKVEIKSGGGGSEVQL |
| | | VESGGGLVQPGGSLKLSCAASGFTFNKYAMNWVRQAPGKGL |
| | | EWVARIRSKYNNYATYYADSVKDRFTISRDDSKNTAYLQMN |
| | | NLKTEDTAVYYCVRHGNFGNSYISYWAYWGQGTLVTVSSGG |
| | | GGSGGGGSGGGGSQTVVTQEPSLTVSPGGTVTLTCGSSTGAV |
| | | TSGNYPNWVQQKPGQAPRGLIGGTKFLAPGTPARFSGSLLGG |
| | | KAALTLSGVQPEDEAEYYCVLWYSNRWVFGGGTKLTVLGGG |
| | | GDKTHTCPPCPAPELLGGPSVFLFPPKPKDTLMISRTPEVTCVV |
| | | VDVSHEDPEVKFNWYVDGVEVHNAKTKPCEEQYGSTYRCVS |
| | | VLTVLHQDWLNGKEYKCKVSNKALPAPIEKTISKAKGQPREP |
| | | QVYTLPPSREEMTKNQVSLTCLVKGFYPSDIAVEWESNGQPE |
| | | NNYKTTPPVLDSDGSFFLYSKLTVDKSRWQQGNVFSCSVMHE |
| | | ALHNHYTQKSLSLSPGKGGGGSGGGGSGGGGSGGGGSGGGG |
| | | SGGGGSDKTHTCPPCPAPELLGGPSVFLFPPKPKDTLMISRTPE |
| | | VTCVVVDVSHEDPEVKFNWYVDGVEVHNAKTKPCEEQYGST |
| | | YRCVSVLTVLHQDWLNGKEYKCKVSNKALPAPIEKTISKAKG |
| | | QPREPQVYTLPPSREEMTKNQVSLTCLVKGFYPSDIAVEWESN |
| | | GQPENNYKTTPPVLDSDGSFFLYSKLTVDKSRWQQGNVFSCS |
| | | VMHEALHNHYTQKSLSLSPGK |

MA 09-H10 scFab × I2C × scFc

| | | |
|---|---|---|
| 386 | VH-CH1 | QITLKESGPTLVKPTQTLTLTCTFSGFSFTTHKMGVDWIRQPPG |
| | | KALEWLALIYWNDDKRYSPSLQSRLTITKDTSKNQVVLTMTN |
| | | MDPVDTATYYCAYRRYNWNYENWFDPWGQGTLVTVSSAST |
| | | KGPSVFPLAPSSKSTSGGTAALGCLVKDYFPEPVTVSWNSGAL |
| | | TSGVHTFPAVLQSSGLYSLSSVVTVPSSSLGTQTYICNVNHKPS |
| | | NTKVDKKVEPKSC |
| 387 | VL-CL | DIQMTQSPSSLSASVGDRVTITCQASQDISNYLNWYQQKPGK |
| | | APKLLIYAASSLQSGVPSRFSGRGSGTDFTLTISSLQPEDFATY |
| | | YCQQSYTPPTTFGPGTKVEIKRTVAAPSVFIFPPSDEQLKSGTA |
| | | SVVCLLNNFYPREAKVQWKVDNALQSGNSQESVTEQDSKDS |
| | | TYSLSSTLTLSKADYEKHKVYACEVTHQGLSSPVTKSFNRGEC |
| 388 | scFab | QITLKESGPTLVKPTQTLTLTCTFSGFSFTTHKMGVDWIRQPPG |
| | | KALEWLALIYWNDDKRYSPSLQSRLTITKDTSKNQVVLTMTN |
| | | MDPVDTATYYCAYRRYNWNYENWFDPWGQGTLVTVSSAST |
| | | KGPSVFPLAPSSKSTSGGTAALGCLVKDYFPEPVTVSWNSGAL |
| | | TSGVHTFPAVLQSSGLYSLSSVVTVPSSSLGTQTYICNVNHKPS |
| | | NTKVDKKVEPKSCGGGGSGGGGSGGGGSGGGGSGGGGSGG |
| | | GGSGGGGSGGGGSDIQMTQSPSSLSASVGDRVTITCQASQDIS |
| | | NYLNWYQQKPGKAPKLLIYAASSLQSGVPSRFSGRGSGTDFT |
| | | LTISSLQPEDFATYYCQQSYTPPTTFGPGTKVEIKRTVAAPSVFI |
| | | FPPSDEQLKSGTASVVCLLNNFYPREAKVQWKVDNALQSGNS |
| | | QESVTEQDSKDSTYSLSSTLTLSKADYEKHKVYACEVTHQGL |
| | | SSPVTKSFNRGEC |
| 389 | scFab- | QITLKESGPTLVKPTQTLTLTCTFSGFSFTTHKMGVDWIRQPPG |
| | BISPECIFIC | KALEWLALIYWNDDKRYSPSLQSRLTITKDTSKNQVVLTMTN |
| | MOL. | MDPVDTATYYCAYRRYNWNYENWFDPWGQGTLVTVSSAST |
| | | KGPSVFPLAPSSKSTSGGTAALGCLVKDYFPEPVTVSWNSGAL |
| | | TSGVHTFPAVLQSSGLYSLSSVVTVPSSSLGTQTYICNVNHKPS |
| | | NTKVDKKVEPKSCGGGGSGGGGSGGGGSGGGGSGGGGSGG |
| | | GGSGGGGSGGGGSDIQMTQSPSSLSASVGDRVTITCQASQDIS |
| | | NYLNWYQQKPGKAPKLLIYAASSLQSGVPSRFSGRGSGTDFT |
| | | LTISSLQPEDFATYYCQQSYTPPTTFGPGTKVEIKRTVAAPSVFI |
| | | FPPSDEQLKSGTASVVCLLNNFYPREAKVQWKVDNALQSGNS |
| | | QESVTEQDSKDSTYSLSSTLTLSKADYEKHKVYACEVTHQGL |
| | | SSPVTKSFNRGECSGGGGSEVQLVESGGGLVQPGGSLKLSCA |
| | | ASGFTFNKYAMNWVRQAPGKGLEWVARIRSKYNNYATYYA |
| | | DSVKDRFTISRDDSKNTAYLQMNNLKTEDTAVYYCVRHGNF |
| | | GNSYISYWAYWGQGTLVTVSSGGGGSGGGGSGGGGSQTVVT |
| | | QEPSLTVSPGGTVTLTCGSSTGAVTSGNYPNWVQQKPGQAPR |
| | | GLIGGTKFLAPGTPARFSGSLLGGKAALTLSGVQPEDEAEYYC |
| | | VLWYSNRWVFGGGTKLTVL |
| 390 | scFab-BiTE | QITLKESGPTLVKPTQTLTLTCTFSGFSFTTHKMGVDWIRQPPG |
| | HLE | KALEWLALIYWNDDKRYSPSLQSRLTITKDTSKNQVVLTMTN |
| | | MDPVDTATYYCAYRRYNWNYENWFDPWGQGTLVTVSSAST |
| | | KGPSVFPLAPSSKSTSGGTAALGCLVKDYFPEPVTVSWNSGAL |
| | | TSGVHTFPAVLQSSGLYSLSSVVTVPSSSLGTQTYICNVNHKPS |
| | | NTKVDKKVEPKSCGGGGSGGGGSGGGGSGGGGSGGGGSGG |
| | | GGSGGGGSGGGGSDIQMTQSPSSLSASVGDRVTITCQASQDIS |
| | | NYLNWYQQKPGKAPKLLIYAASSLQSGVPSRFSGRGSGTDFT |
| | | LTISSLQPEDFATYYCQQSYTPPTTFGPGTKVEIKRTVAAPSVFI |
| | | FPPSDEQLKSGTASVVCLLNNFYPREAKVQWKVDNALQSGNS |
| | | QESVTEQDSKDSTYSLSSTLTLSKADYEKHKVYACEVTHQGL |
| | | SSPVTKSFNRGECSGGGGSEVQLVESGGGLVQPGGSLKLSCA |
| | | ASGFTFNKYAMNWVRQAPGKGLEWVARIRSKYNNYATYYA |
| | | DSVKDRFTISRDDSKNTAYLQMNNLKTEDTAVYYCVRHGNF |
| | | GNSYISYWAYWGQGTLVTVSSGGGGSGGGGSGGGGSQTVVT |
| | | QEPSLTVSPGGTVTLTCGSSTGAVTSGNYPNWVQQKPGQAPR |
| | | GLIGGTKFLAPGTPARFSGSLLGGKAALTLSGVQPEDEAEYYC |
| | | VLWYSNRWVFGGGTKLTVLGGGGDKTHTCPPCPAPELLGGP |
| | | SVFLFPPKPKDTLMISRTPEVTCVVVDVSHEDPEVKFNWYVD |
| | | GVEVHNAKTKPCEEQYGSTYRCVSVLTVLHQDWLNGKEYKC |
| | | KVSNKALPAPIEKTISKAKGQPREPQVYTLPPSREEMTKNQVS |
| | | LTCLVKGFYPSDIAVEWESNGQPENNYKTTPPVLDSDGSFFLY |
| | | SKLTVDKSRWQQGNVFSCSVMHEALHNHYTQKSLSLSPGKG |
| | | GGGSGGGGSGGGGSGGGGSGGGGSGGGGSDKTHTCPPCPAP |
| | | ELLGGPSVFLFPPKPKDTLMISRTPEVTCVVVDVSHEDPEVKF |
| | | NWYVDGVEVHNAKTKPCEEQYGSTYRCVSVLTVLHQDWLN |
| | | GKEYKCKVSNKALPAPIEKTISKAKGQPREPQVYTLPPSREEM |
| | | TKNQVSLTCLVKGFYPSDIAVEWESNGQPENNYKTTPPVLDS |
| | | DGSFFLYSKLTVDKSRWQQGNVFSCSVMHEALHNHYTQKSL |
| | | SLSPGK |

MA 10-D3 CC scFv × I2C × scFc

| | | |
|---|---|---|
| 391 | HCDR1 | NAWMS |
| 392 | HCDR2 | RITSSRYGGTTDYAAPVKG |
| 393 | HCDR3 | PSYSGSYYNYFSVMDV |
| 394 | LCDR1 | RTSQSISSYLN |
| 395 | LCDR2 | AASSLQG |
| 396 | LCDR3 | QQTYSMPFT |
| 397 | VH | EVQLVESGGGLVQPGGSLRLSCAASGFTFSNAWMSWVRQAP |
| | | GKCLEWVGRITSSRYGGTTDYAAPVKGRFTISRDDSKNTLFLQ |
| | | MNSLKTEDTAVYYCTTPSYSGSYYNYFSVMDVWGQGTTVTV |
| | | SS |
| 398 | VL | DIQMTQSPSSLSASVGDRVTITCRTSQSISSYLNWYQQKPGRA |
| | | PKLLIFAASSLQGGVPSRFSGSGSGTDFTLTISSLQPEDFATYYC |
| | | QQTYSMPFTFGCGTKVDIK |
| 399 | SCFV | EVQLVESGGGLVQPGGSLRLSCAASGFTFSNAWMSWVRQAP |
| | | GKCLEWVGRITSSRYGGTTDYAAPVKGRFTISRDDSKNTLFLQ |
| | | MNSLKTEDTAVYYCTTPSYSGSYYNYFSVMDVWGQGTTVTV |
| | | SSGGGGGGGGSGGGGSDIQMTQSPSSLSASVGDRVTITCRTS |
| | | QSISSYLNWYQQKPGRAPKLLIFAASSLQGGVPSRFSGSGSGT |
| | | DFTLTISSLQPEDFATYYCQQTYSMPFTFGCGTKVDIK |
| 400 | BISPECIFIC | EVQLVESGGGLVQPGGSLRLSCAASGFTFSNAWMSWVRQAP |
| | MOL. | GKCLEWVGRITSSRYGGTTDYAAPVKGRFTISRDDSKNTLFLQ |
| | | MNSLKTEDTAVYYCTTPSYSGSYYNYFSVMDVWGQGTTVTV |
| | | SSGGGGGGGGSGGGGSDIQMTQSPSSLSASVGDRVTITCRTS |
| | | QSISSYLNWYQQKPGRAPKLLIFAASSLQGGVPSRFSGSGSGT |
| | | DFTLTISSLQPEDFATYYCQQTYSMPFTFGCGTKVDIKSGGGG |
| | | SEVQLVESGGGLVQPGGSLKLSCAASGFTFNKYAMNWVRQA |
| | | PGKGLEWVARIRSKYNNYATYYADSVKDRFTISRDDSKNTAY |
| | | LQMNNLKTEDTAVYYCVRHGNFGNSYISYWAYWGQGTLVT |
| | | VSSGGGGSGGGGSGGGGSQTVVTQEPSLTVSPGGTVTLTCGS |
| | | STGAVTSGNYPNWVQQKPGQAPRGLIGGTKFLAPGTPARFSG |
| | | SLLGGKAALTLSGVQPEDEAEYYCVLWYSNRWVFGGGTKLT |
| | | VL |
| 401 | BiTE HLE | EVQLVESGGGLVQPGGSLRLSCAASGFTFSNAWMSWVRQAP |
| | | GKCLEWVGRITSSRYGGTTDYAAPVKGRFTISRDDSKNTLFLQ |
| | | MNSLKTEDTAVYYCTTPSYSGSYYNYFSVMDVWGQGTTVTV |
| | | SSGGGGSGGGGSGGGGSDIQMTQSPSSLSASVGDRVTITCRTS |
| | | QSISSYLNWYQQKPGRAPKLLIFAASSLQGGVPSRFSGSGSGT |
| | | DFTLTISSLQPEDFATYYCQQTYSMPFTFGCGTKVDIKSGGGG |
| | | SEVQLVESGGGLVQPGGSLKLSCAASGFTFNKYAMNWVRQA |
| | | PGKGLEWVARIRSKYNNYATYYADSVKDRFTISRDDSKNTAY |
| | | LQMNNLKTEDTAVYYCVRHGNFGNSYISYWAYWGQGTLVT |
| | | VSSGGGGSGGGGSGGGGSQTVVTQEPSLTVSPGGTVTLTCGS |
| | | STGAVTSGNYPNWVQQKPGQAPRGLIGGTKFLAPGTPARFSG |
| | | SLLGGKAALTLSGVQPEDEAEYYCVLWYSNRWVFGGGTKLT |
| | | VLGGGGDKTHTCPPCPAPELLGGPSVFLFPPKPKDTLMISRTPE |
| | | VTCVVVDVSHEDPEVKFNWYVDGVEVHNAKTKPCEEQYGST |
| | | YRCVSVLTVLHQDWLNGKEYKCKVSNKALPAPIEKTISKAKG |
| | | QPREPQVYTLPPSREEMTKNQVSLTCLVKGFYPSDIAVEWESN |
| | | GQPENNYKTTPPVLDSDGSFFLYSKLTVDKSRWQQGNVFSCS |
| | | VMHEALHNHYTQKSLSLSPGKGGGGSGGGGSGGGGSGGGGS |
| | | GGGGSGGGGSDKTHTCPPCPAPELLGGPSVFLFPPKPKDTLMI |
| | | SRTPEVTCVVVDVSHEDPEVKFNWYVDGVEVHNAKTKPCEE |
| | | QYGSTYRCVSVLTVLHQDWLNGKEYKCKVSNKALPAPIEKTI |
| | | SKAKGQPREPQVYTLPPSREEMTKNQVSLTCLVKGFYPSDIAV |
| | | EWESNGQPENNYKTTPPVLDSDGSFFLYSKLTVDKSRWQQGN |
| | | VFSCSVMHEALHNHYTQKSLSLSPGK |

MA 10-D3 scFab × I2C × scFc

| | | |
|---|---|---|
| 402 | VH-CH1 | EVQLVESGGGLVQPGGSLRLSCAASGFTFSNAWMSWVRQAP |
| | | GKGLEWVGRITSSRYGGTTDYAAPVKGRFTISRDDSKNTLFL |
| | | QMNSLKTEDTAVYYCTTPSYSGSYYNYFSVMDVWGQGTTVT |
| | | VSSASTKGPSVFPLAPSSKSTSGGTAALGCLVKDYFPEPVTVS |
| | | WNSGALTSGVHTFPAVLQSSGLYSLSSVVTVPSSSLGTQTYIC |
| | | NVNHKPSNTKVDKKVEPKSC |
| 403 | VL-CL | DIQMTQSPSSLSASVGDRVTITCRTSQSISSYLNWYQQKPGRA |
| | | PKLLIFAASSLQGGVPSRFSGSGSGTDFTLTISSLQPEDFATYYC |
| | | QQTYSMPFTFGPGTKVDIKRTVAAPSVFIFPPSDEQLKSGTASV |
| | | VCLLNNFYPREAKVQWKVDNALQSGNSQESVTEQDSKDSTY |
| | | SLSSTLTLSKADYEKHKVYACEVTHQGLSSPVTKSFNRGEC |
| 404 | scFab | EVQLVESGGGLVQPGGSLRLSCAASGFTFSNAWMSWVRQAP |
| | | GKGLEWVGRITSSRYGGTTDYAAPVKGRFTISRDDSKNTLFL |
| | | QMNSLKTEDTAVYYCTTPSYSGSYYNYFSVMDVWGQGTTVT |
| | | VSSASTKGPSVFPLAPSSKSTSGGTAALGCLVKDYFPEPVTVS |
| | | WNSGALTSGVHTFPAVLQSSGLYSLSSVVTVPSSSLGTQTYIC |
| | | NVNHKPSNTKVDKKVEPKSCGGGGSGGGGSGGGGSGGGGSG |
| | | GGGSGGGGSGGGGSGGGGSDIQMTQSPSSLSASVGDRVTITC |
| | | RTSQSISSYLNWYQQKPGRAPKLLIFAASSLQGGVPSRFSGSGS |
| | | GTDFTLTISSLQPEDFATYYCQQTYSMPFTFGPGTKVDIKRTV |
| | | AAPSVFIFPPSDEQLKSGTASVVCLLNNFYPREAKVQWKVDN |
| | | ALQSGNSQESVTEQDSKDSTYSLSSTLTLSKADYEKHKVYAC |
| | | EVTHQGLSSPVTKSFNRGEC |
| 405 | scFab- | EVQLVESGGGLVQPGGSLRLSCAASGFTFSNAWMSWVRQAP |
| | BISPECIFIC | GKGLEWVGRITSSRYGGTTDYAAPVKGRFTISRDDSKNTLFL |
| | MOL. | QMNSLKTEDTAVYYCTTPSYSGSYYNYFSVMDVWGQGTTVT |
| | | VSSASTKGPSVFPLAPSSKSTSGGTAALGCLVKDYFPEPVTVS |
| | | WNSGALTSGVHTFPAVLQSSGLYSLSSVVTVPSSSLGTQTYIC |
| | | NVNHKPSNTKVDKKVEPKSCGGGGSGGGGSGGGGSGGGGSG |
| | | GGGSGGGGSGGGGSGGGGSDIQMTQSPSSLSASVGDRVTITC |
| | | RTSQSISSYLNWYQQKPGRAPKLLIFAASSLQGGVPSRFSGSGS |
| | | GTDFTLTISSLQPEDFATYYCQQTYSMPFTFGPGTKVDIKRTV |
| | | AAPSVFIFPPSDEQLKSGTASVVCLLNNFYPREAKVQWKVDN |
| | | ALQSGNSQESVTEQDSKDSTYSLSSTLTLSKADYEKHKVYAC |
| | | EVTHQGLSSPVTKSFNRGECSGGGGSEVQLVESGGGLVQPGG |
| | | SLKLSCAASGFTFNKYAMNWVRQAPGKGLEWVARIRSKYNN |
| | | YATYYADSVKDRFTISRDDSKNTAYLQMNNLKTEDTAVYYC |
| | | VRHGNFGNSYISYWAYWGQGTLVTVSSGGGGSGGGGSGGG |
| | | GSQTVVTQEPSLTVSPGGTVTLTCGSSTGAVTSGNYPNWVQQ |
| | | KPGQAPRGLIGGTKFLAPGTPARFSGSLLGGKAALTLSGVQPE |
| | | DEAEYYCVLWYSNRWVFGGGTKLTVL |
| 406 | scFab-BiTE | EVQLVESGGGLVQPGGSLRLSCAASGFTFSNAWMSWVRQAP |
| | HLE | GKGLEWVGRITSSRYGGTTDYAAPVKGRFTISRDDSKNTLFL |
| | | QMNSLKTEDTAVYYCTTPSYSGSYYNYFSVMDVWGQGTTVT |
| | | VSSASTKGPSVFPLAPSSKSTSGGTAALGCLVKDYFPEPVTVS |
| | | WNSGALTSGVHTFPAVLQSSGLYSLSSVVTVPSSSLGTQTYIC |
| | | NVNHKPSNTKVDKKVEPKSCGGGGSGGGGSGGGGSGGGGSG |
| | | GGGSGGGGSGGGGSGGGGSDIQMTQSPSSLSASVGDRVTITC |
| | | RTSQSISSYLNWYQQKPGRAPKLLIFAASSLQGGVPSRFSGSGS |
| | | GTDFTLTISSLQPEDFATYYCQQTYSMPFTFGPGTKVDIKRTV |
| | | AAPSVFIFPPSDEQLKSGTASVVCLLNNFYPREAKVQWKVDN |
| | | ALQSGNSQESVTEQDSKDSTYSLSSTLTLSKADYEKHKVYAC |
| | | EVTHQGLSSPVTKSFNRGECSGGGGSEVQLVESGGGLVQPGG |
| | | SLKLSCAASGFTFNKYAMNWVRQAPGKGLEWVARIRSKYNN |
| | | YATYYADSVKDRFTISRDDSKNTAYLQMNNLKTEDTAVYYC |
| | | VRHGNFGNSYISYWAYWGQGTLVTVSSGGGGSGGGGSGGG |
| | | GSQTVVTQEPSLTVSPGGTVTLTCGSSTGAVTSGNYPNWVQQ |
| | | KPGQAPRGLIGGTKFLAPGTPARFSGSLLGGKAALTLSGVQPE |
| | | DEAEYYCVLWYSNRWVFGGGTKLTVLGGGGDKTHTCPPCPA |
| | | PELLGGPSVFLFPPKPKDTLMISRTPEVTCVVVDVSHEDPEVKF |
| | | NWYVDGVEVHNAKTKPCEEQYGSTYRCVSVLTVLHQDWLN |
| | | GKEYKCKVSNKALPAPIEKTISKAKGQPREPQVYTLPPSREEM |
| | | TKNQVSLTCLVKGFYPSDIAVEWESNGQPENNYKTTPPVLDS |
| | | DGSFFLYSKLTVDKSRWQQGNVFSCSVMHEALHNHYTQKSL |
| | | SLSPGKGGGGSGGGGSGGGGSGGGGSGGGGSGGGGSDKTHT |
| | | CPPCPAPELLGGPSVFLFPPKPKDTLMISRTPEVTCVVVDVSHE |
| | | DPEVKFNWYVDGVEVHNAKTKPCEEQYGSTYRCVSVLTVLH |
| | | QDWLNGKEYKCKVSNKALPAPIEKTISKAKGQPREPQVYTLP |
| | | PSREEMTKNQVSLTCLVKGFYPSDIAVEWESNGQPENNYKTT |
| | | PPVLDSDGSFFLYSKLTVDKSRWQQGNVFSCSVMHEALHNH |
| | | YTQKSLSLSPGK |

MA 10-D6 CC scFv × 12C × scFc

| | | |
|---|---|---|
| 407 | HCDR1 | NAWMS |
| 408 | HCDR2 | RILNNAYGGTTDYAAPVKG |
| 409 | HCDR3 | PSYSGSYYNYFSVMDV |
| 410 | LCDR1 | RTSQSISSYLN |
| 411 | LCDR2 | AASSLQG |
| 412 | LCDR3 | QQTYSMPFT |
| 413 | VH | EVQLVESGGGLVKPGGSLRLSCAASGFTFSNAWMSWVRQAP |
| | | GKCLEWVGRILNNAYGGTTDYAAPVKGRFTISRDDSKNTLYL |
| | | QMNSLKTEDTAVYYCTTPSYSGSYYNYFSVMDVWGQGTTVT |
| | | VSS |
| 414 | VL | DIQMTQSPSSLSASVGDRVTITCRTSQSISSYLNWYQQKPGRA |
| | | PKLLIFAASSLQGGVPSRFSGSGSGTDFTLTISSLQPEDFATYYC |
| | | QQTYSMPFTFGCGTKVDIK |
| 415 | SCFV | EVQLVESGGGLVKPGGSLRLSCAASGFTFSNAWMSWVRQAP |
| | | GKCLEWVGRILNNAYGGTTDYAAPVKGRFTISRDDSKNTLYL |
| | | QMNSLKTEDTAVYYCTTPSYSGSYYNYFSVMDVWGQGTTVT |
| | | VSSGGGGSGGGGSGGGGSDIQMTQSPSSLSASVGDRVTITCRT |
| | | SQSISSYLNWYQQKPGRAPKLLIFAASSLQGGVPSRFSGSGSGT |
| | | DFTLTISSLQPEDFATYYCQQTYSMPFTFGCGTKVDIK |
| 416 | BISPECIFIC | EVQLVESGGGLVKPGGSLRLSCAASGFTFSNAWMSWVRQAP |
| | MOL. | GKCLEWVGRILNNAYGGTTDYAAPVKGRFTISRDDSKNTLYL |
| | | QMNSLKTEDTAVYYCTTPSYSGSYYNYFSVMDVWGQGTTVT |
| | | VSSGGGGSGGGGSGGGGSDIQMTQSPSSLSASVGDRVTITCRT |
| | | SQSISSYLNWYQQKPGRAPKLLIFAASSLQGGVPSRFSGSGSGT |
| | | DFTLTISSLQPEDFATYYCQQTYSMPFTFGCGTKVDIKSGGGG |
| | | SEVQLVESGGGLVQPGGSLKLSCAASGFTFNKYAMNWVRQA |
| | | PGKGLEWVARIRSKYNNYATYYADSVKDRFTISRDDSKNTAY |
| | | LQMNNLKTEDTAVYYCVRHGNFGNSYISYWAYWGQGTLVT |
| | | VSSGGGGSGGGGSGGGGSQTVVTQEPSLTVSPGGTVTLTCGS |
| | | STGAVTSGNYPNWVQQKPGQAPRGLIGGTKFLAPGTPARFSG |
| | | SLLGGKAALTLSGVQPEDEAEYYCVLWYSNRWVFGGGTKLT |
| | | VL |
| 417 | BiTE HLE | EVQLVESGGGLVKPGGSLRLSCAASGFTFSNAWMSWVRQAP |
| | | GKCLEWVGRILNNAYGGTTDYAAPVKGRFTISRDDSKNTLYL |
| | | QMNSLKTEDTAVYYCTTPSYSGSYYNYFSVMDVWGQGTTVT |
| | | VSSGGGGSGGGGSGGGGSDIQMTQSPSSLSASVGDRVTITCRT |
| | | SQSISSYLNWYQQKPGRAPKLLIFAASSLQGGVPSRFSGSGSGT |
| | | DFTLTISSLQPEDFATYYCQQTYSMPFTFGCGTKVDIKSGGGG |
| | | SEVQLVESGGGLVQPGGSLKLSCAASGFTFNKYAMNWVRQA |
| | | PGKGLEWVARIRSKYNNYATYYADSVKDRFTISRDDSKNTAY |
| | | LQMNNLKTEDTAVYYCVRHGNFGNSYISYWAYWGQGTLVT |
| | | VSSGGGGSGGGGSGGGGSQTVVTQEPSLTVSPGGTVTLTCGS |
| | | STGAVTSGNYPNWVQQKPGQAPRGLIGGTKFLAPGTPARFSG |
| | | SLLGGKAALTLSGVQPEDEAEYYCVLWYSNRWVFGGGTKLT |
| | | VLGGGGDKTHTCPPCPAPELLGGPSVFLFPPKPKDTLMISRTPE |
| | | VTCVVVDVSHEDPEVKFNWYVDGVEVHNAKTKPCEEQYGST |
| | | YRCVSVLTVLHQDWLNGKEYKCKVSNKALPAPIEKTISKAKG |
| | | QPREPQVYTLPPSREEMTKNQVSLTCLVKGFYPSDIAVEWESN |
| | | GQPENNYKTTPPVLDSDGSFFLYSKLTVDKSRWQQGNVFSCS |
| | | VMHEALHNHYTQKSLSLSPGKGGGGSGGGGSGGGGSGGGGS |
| | | GGGGSGGGGSDKTHTCPPCPAPELLGGPSVFLFPPKPKDTLMI |
| | | SRTPEVTCVVVDVSHEDPEVKFNWYVDGVEVHNAKTKPCEE |
| | | QYGSTYRCVSVLTVLHQDWLNGKEYKCKVSNKALPAPIEKTI |
| | | SKAKGQPREPQVYTLPPSREEMTKNQVSLTCLVKGFYPSDIAV |
| | | EWESNGQPENNYKTTPPVLDSDGSFFLYSKLTVDKSRWQQGN |
| | | VFSCSVMHEALHNHYTQKSLSLSPGK |

MA 10-D6 scFab × I2C × scFc

| | | |
|---|---|---|
| 418 | VH-CH1 | EVQLVESGGGLVKPGGSLRLSCAASGFTFSNAWMSWVRQAP |
| | | GKGLEWVGRILNNAYGGTTDYAAPVKGRFTISRDDSKNTLYL |
| | | QMNSLKTEDTAVYYCTTPSYSGSYYNYFSVMDVWGQGTTVT |
| | | VSSASTKGPSVFPLAPSSKSTSGGTAALGCLVKDYFPEPVTVS |
| | | WNSGALTSGVHTFPAVLQSSGLYSLSSVVTVPSSSLGTQTYIC |
| | | NVNHKPSNTKVDKKVEPKSC |
| 419 | VL-CL | DIQMTQSPSSLSASVGDRVTITCRTSQSISSYLNWYQQKPGRA |
| | | PKLLIFAASSLQGGVPSRFSGSGSGTDFTLTISSLQPEDFATYYC |
| | | QQTYSMPFTFGPGTKVDIKRTVAAPSVFIFPPSDEQLKSGTASV |
| | | VCLLNNFYPREAKVQWKVDNALQSGNSQESVTEQDSKDSTY |
| | | SLSSTLTLSKADYEKHKVYACEVTHQGLSSPVTKSFNRGEC |
| 420 | scFab | EVQLVESGGGLVKPGGSLRLSCAASGFTFSNAWMSWVRQAP |
| | | GKGLEWVGRILNNAYGGTTDYAAPVKGRFTISRDDSKNTLYL |
| | | QMNSLKTEDTAVYYCTTPSYSGSYYNYFSVMDVWGQGTTVT |
| | | VSSASTKGPSVFPLAPSSKSTSGGTAALGCLVKDYFPEPVTVS |
| | | WNSGALTSGVHTFPAVLQSSGLYSLSSVVTVPSSSLGTQTYIC |
| | | NVNHKPSNTKVDKKVEPKSCGGGGSGGGGSGGGGSGGGGSG |
| | | GGGSGGGGSGGGGSGGGGSDIQMTQSPSSLSASVGDRVTITC |
| | | RTSQSISSYLNWYQQKPGRAPKLLIFAASSLQGGVPSRFSGSGS |
| | | GTDFTLTISSLQPEDFATYYCQQTYSMPFTFGPGTKVDIKRTV |
| | | AAPSVFIFPPSDEQLKSGTASVVCLLNNFYPREAKVQWKVDN |
| | | ALQSGNSQESVTEQDSKDSTYSLSSTLTLSKADYEKHKVYAC |
| | | EVTHQGLSSPVTKSFNRGEC |
| 421 | scFab- | EVQLVESGGGLVKPGGSLRLSCAASGFTFSNAWMSWVRQAP |
| | BISPECIFIC | GKGLEWVGRILNNAYGGTTDYAAPVKGRFTISRDDSKNTLYL |
| | MOL. | QMNSLKTEDTAVYYCTTPSYSGSYYNYFSVMDVWGQGTTVT |
| | | VSSASTKGPSVFPLAPSSKSTSGGTAALGCLVKDYFPEPVTVS |
| | | WNSGALTSGVHTFPAVLQSSGLYSLSSVVTVPSSSLGTQTYIC |
| | | NVNHKPSNTKVDKKVEPKSCGGGGSGGGGSGGGGSGGGGSG |
| | | GGGSGGGGSGGGGSGGGGSDIQMTQSPSSLSASVGDRVTITC |
| | | RTSQSISSYLNWYQQKPGRAPKLLIFAASSLQGGVPSRFSGSGS |
| | | GTDFTLTISSLQPEDFATYYCQQTYSMPFTFGPGTKVDIKRTV |
| | | AAPSVFIFPPSDEQLKSGTASVVCLLNNFYPREAKVQWKVDN |
| | | ALQSGNSQESVTEQDSKDSTYSLSSTLTLSKADYEKHKVYAC |
| | | EVTHQGLSSPVTKSFNRGECSGGGGSEVQLVESGGGLVQPGG |
| | | SLKLSCAASGFTFNKYAMNWVRQAPGKGLEWVARIRSKYNN |
| | | YATYYADSVKDRFTISRDDSKNTAYLQMNNLKTEDTAVYYC |
| | | VRHGNFGNSYISYWAYWGQGTLVTVSSGGGGSGGGGSGGG |
| | | GSQTVVTQEPSLTVSPGGTVTLTCGSSTGAVTSGNYPNWVQQ |
| | | KPGQAPRGLIGGTKFLAPGTPARFSGSLLGGKAALTLSGVQPE |
| | | DEAEYYCVLWYSNRWVFGGGTKLTVL |
| 422 | scFab-BiTE | EVQLVESGGGLVKPGGSLRLSCAASGFTFSNAWMSWVRQAP |
| | HLE | GKGLEWVGRILNNAYGGTTDYAAPVKGRFTISRDDSKNTLYL |
| | | QMNSLKTEDTAVYYCTTPSYSGSYYNYFSVMDVWGQGTTVT |
| | | VSSASTKGPSVFPLAPSSKSTSGGTAALGCLVKDYFPEPVTVS |
| | | WNSGALTSGVHTFPAVLQSSGLYSLSSVVTVPSSSLGTQTYIC |
| | | NVNHKPSNTKVDKKVEPKSCGGGGSGGGGSGGGGSGGGGSG |
| | | GGGSGGGGSGGGGSGGGGSDIQMTQSPSSLSASVGDRVTITC |
| | | RTSQSISSYLNWYQQKPGRAPKLLIFAASSLQGGVPSRFSGSGS |
| | | GTDFTLTISSLQPEDFATYYCQQTYSMPFTFGPGTKVDIKRTV |
| | | AAPSVFIFPPSDEQLKSGTASVVCLLNNFYPREAKVQWKVDN |
| | | ALQSGNSQESVTEQDSKDSTYSLSSTLTLSKADYEKHKVYAC |
| | | EVTHQGLSSPVTKSFNRGECSGGGGSEVQLVESGGGLVQPGG |
| | | SLKLSCAASGFTFNKYAMNWVRQAPGKGLEWVARIRSKYNN |
| | | YATYYADSVKDRFTISRDDSKNTAYLQMNNLKTEDTAVYYC |
| | | VRHGNFGNSYISYWAYWGQGTLVTVSSGGGGSGGGGSGGG |
| | | GSQTVVTQEPSLTVSPGGTVTLTCGSSTGAVTSGNYPNWVQQ |
| | | KPGQAPRGLIGGTKFLAPGTPARFSGSLLGGKAALTLSGVQPE |
| | | DEAEYYCVLWYSNRWVFGGGTKLTVLGGGGDKTHTCPPCPA |
| | | PELLGGPSVFLFPPKPKDTLMISRTPEVTCVVVDVSHEDPEVKF |
| | | NWYVDGVEVHNAKTKPCEEQYGSTYRCVSVLTVLHQDWLN |
| | | GKEYKCKVSNKALPAPIEKTISKAKGQPREPQVYTLPPSREEM |
| | | TKNQVSLTCLVKGFYPSDIAVEWESNGQPENNYKTTPPVLDS |
| | | DGSFFLYSKLTVDKSRWQQGNVFSCSVMHEALHNHYTQKSL |
| | | SLSPGKGGGGSGGGGSGGGGSGGGGSGGGGSGGGGSDKTHT |
| | | CPPCPAPELLGGPSVFLFPPKPKDTLMISRTPEVTCVVVDVSHE |
| | | DPEVKFNWYVDGVEVHNAKTKPCEEQYGSTYRCVSVLTVLH |
| | | QDWLNGKEYKCKVSNKALPAPIEKTISKAKGQPREPQVYTLP |
| | | PSREEMTKNQVSLTCLVKGFYPSDIAVEWESNGQPENNYKTT |
| | | PPVLDSDGSFFLYSKLTVDKSRWQQGNVFSCSVMHEALHNH |
| | | YTQKSLSLSPGK |

MA 10-G10 AS CC scFv × I2C × scFc

| | | |
|---|---|---|
| 423 | HCDR1 | SHAMS |
| 424 | HCDR2 | AISGSGGGTYNAASVKG |
| 425 | HCDR3 | GKGVHLGFDY |
| 426 | LCDR1 | GGNNIGSKSVH |
| 427 | LCDR2 | DDNDRPS |
| 428 | LCDR3 | QVWDYVAPRHV |
| 429 | VH | EVQLLESGGGLVQPGGSLRLSCAASGFTFSSHAMSWVRQAPG |
| | | KCLEWVSAISGSGGGTYNAASVKGRFTISRDNSKNTLYLQMN |
| | | SLRAEDTAVYYCATGKGVHLGFDYWGQGTLVTVSS |
| 430 | VL | SYVLTQPPSVSVAPGQTARITCGGNNIGSKSVHWYQQKPGQA |
| | | PVMVVYDDNDRPSGIPERFSGSNSGNTATLTISRVEAGDEADY |
| | | YCQVWDYVAPRHVFGCGTKLTVL |
| 431 | SCFV | EVQLLESGGGLVQPGGSLRLSCAASGFTFSSHAMSWVRQAPG |
| | | KCLEWVSAISGSGGGTYNAASVKGRFTISRDNSKNTLYLQMN |
| | | SLRAEDTAVYYCATGKGVHLGFDYWGQGTLVTVSSGGGGSG |
| | | GGGSGGGGSSYVLTQPPSVSVAPGQTARITCGGNNIGSKSVH |
| | | WYQQKPGQAPVMVVYDDNDRPSGIPERFSGSNSGNTATLTIS |
| | | RVEAGDEADYYCQVWDYVAPRHVFGCGTKLTVL |
| 432 | BISPECIFIC | EVQLLESGGGLVQPGGSLRLSCAASGFTFSSHAMSWVRQAPG |
| | MOL. | KCLEWVSAISGSGGGTYNAASVKGRFTISRDNSKNTLYLQMN |
| | | SLRAEDTAVYYCATGKGVHLGFDYWGQGTLVTVSSGGGGSG |
| | | GGGSGGGGSSYVLTQPPSVSVAPGQTARITCGGNNIGSKSVH |
| | | WYQQKPGQAPVMVVYDDNDRPSGIPERFSGSNSGNTATLTIS |
| | | RVEAGDEADYYCQVWDYVAPRHVFGCGTKLTVLSGGGGSE |
| | | VQLVESGGGLVQPGGSLKLSCAASGFTFNKYAMNWVRQAPG |
| | | KGLEWVARIRSKYNNYATYYADSVKDRFTISRDDSKNTAYLQ |
| | | MNNLKTEDTAVYYCVRHGNFGNSYISYWAYWGQGTLVTVS |
| | | SGGGGSGGGGSGGGGSQTVVTQEPSLTVSPGGTVTLTCGSST |
| | | GAVTSGNYPNWVQQKPGQAPRGLIGGTKFLAPGTPARFSGSL |
| | | LGGKAALTLSGVQPEDEAEYYCVLWYSNRWVFGGGTKLTVL |
| 433 | BiTE HLE | EVQLLESGGGLVQPGGSLRLSCAASGFTFSSHAMSWVRQAPG |
| | | KCLEWVSAISGSGGGTYNAASVKGRFTISRDNSKNTLYLQMN |
| | | SLRAEDTAVYYCATGKGVHLGFDYWGQGTLVTVSSGGGGSG |
| | | GGGSGGGGSSYVLTQPPSVSVAPGQTARITCGGNNIGSKSVH |
| | | WYQQKPGQAPVMVVYDDNDRPSGIPERFSGSNSGNTATLTIS |
| | | RVEAGDEADYYCQVWDYVAPRHVFGCGTKLTVLSGGGGSE |
| | | VQLVESGGGLVQPGGSLKLSCAASGFTFNKYAMNWVRQAPG |
| | | KGLEWVARIRSKYNNYATYYADSVKDRFTISRDDSKNTAYLQ |
| | | MNNLKTEDTAVYYCVRHGNFGNSYISYWAYWGQGTLVTVS |
| | | SGGGGSGGGGSGGGGSQTVVTQEPSLTVSPGGTVTLTCGSST |
| | | GAVTSGNYPNWVQQKPGQAPRGLIGGTKFLAPGTPARFSGSL |
| | | LGGKAALTLSGVQPEDEAEYYCVLWYSNRWVFGGGTKLTVL |
| | | GGGGDKTHTCPPCPAPELLGGPSVFLFPPKPKDTLMISRTPEVT |
| | | CVVVDVSHEDPEVKFNWYVDGVEVHNAKTKPCEEQYGSTYR |
| | | CVSVLTVLHQDWLNGKEYKCKVSNKALPAPIEKTISKAKGQP |
| | | REPQVYTLPPSREEMTKNQVSLTCLVKGFYPSDIAVEWESNG |
| | | QPENNYKTTPPVLDSDGSFFLYSKLTVDKSRWQQGNVFSCSV |
| | | MHEALHNHYTQKSLSLSPGKGGGGSGGGGSGGGGSGGGGSG |
| | | GGGSGGGGSDKTHTCPPCPAPELLGGPSVFLFPPKPKDTLMIS |
| | | RTPEVTCVVVDVSHEDPEVKFNWYVDGVEVHNAKTKPCEEQ |
| | | YGSTYRCVSVLTVLHQDWLNGKEYKCKVSNKALPAPIEKTIS |
| | | KAKGQPREPQVYTLPPSREEMTKNQVSLTCLVKGFYPSDIAVE |
| | | WESNGQPENNYKTTPPVLDSDGSFFLYSKLTVDKSRWQQGN |
| | | VFSCSVMHEALHNHYTQKSLSLSPGK |

MA 10-G10 AS scFab × I2C × scFc

| | | |
|---|---|---|
| 434 | VH-CH1 | EVQLLESGGGLVQPGGSLRLSCAASGFTFSSHAMSWVRQAPG |
| | | KGLEWVSAISGSGGGTYNAASVKGRFTISRDNSKNTLYLQMN |
| | | SLRAEDTAVYYCATGKGVHLGFDYWGQGTLVTVSSASTKGP |
| | | SVFPLAPSSKSTSGGTAALGCLVKDYFPEPVTVSWNSGALTSG |
| | | VHTFPAVLQSSGLYSLSSVVTVPSSSLGTQTYICNVNHKPSNT |
| | | KVDKKVEPKSC |
| 435 | VL-CL | SYVLTQPPSVSVAPGQTARITCGGNNIGSKSVHWYQQKPGQA |
| | | PVMVVYDDNDRPSGIPERFSGSNSGNTATLTISRVEAGDEADY |
| | | YCQVWDYVAPRHVFGGGTKLTVLGQPKAAPSVTLFPPSSEEL |
| | | QANKATLVCLISDFYPGAVTVAWKADSSPVKAGVETTTPSKQ |
| | | SNNKYAASSYLSLTPEQWKSHKSYSCQVTHEGSTVEKTVAPT |
| | | ECS |
| 436 | scFab | EVQLLESGGGLVQPGGSLRLSCAASGFTFSSHAMSWVRQAPG |
| | | KGLEWVSAISGSGGGTYNAASVKGRFTISRDNSKNTLYLQMN |
| | | SLRAEDTAVYYCATGKGVHLGFDYWGQGTLVTVSSASTKGP |
| | | SVFPLAPSSKSTSGGTAALGCLVKDYFPEPVTVSWNSGALTSG |
| | | VHTFPAVLQSSGLYSLSSVVTVPSSSLGTQTYICNVNHKPSNT |
| | | KVDKKVEPKSCGGGGSGGGGSGGGGSGGGGSGGGGSGGGG |
| | | SGGGGSGGGGSSYVLTQPPSVSVAPGQTARITCGGNNIGSKSV |
| | | HWYQQKPGQAPVMVVYDDNDRPSGIPERFSGSNSGNTATLTI |
| | | SRVEAGDEADYYCQVWDYVAPRHVFGGGTKLTVLGQPKAA |
| | | PSVTLFPPSSEELQANKATLVCLISDFYPGAVTVAWKADSSPV |
| | | KAGVETTTPSKQSNNKYAASSYLSLTPEQWKSHKSYSCQVTH |
| | | EGSTVEKTVAPTECS |
| 437 | scFab- | EVQLLESGGGLVQPGGSLRLSCAASGFTFSSHAMSWVRQAPG |
| | BISPECIFIC | KGLEWVSAISGSGGGTYNAASVKGRFTISRDNSKNTLYLQMN |
| | MOL. | SLRAEDTAVYYCATGKGVHLGFDYWGQGTLVTVSSASTKGP |
| | | SVFPLAPSSKSTSGGTAALGCLVKDYFPEPVTVSWNSGALTSG |
| | | VHTFPAVLQSSGLYSLSSVVTVPSSSLGTQTYICNVNHKPSNT |
| | | KVDKKVEPKSCGGGGSGGGGSGGGGSGGGGSGGGGSGGGG |
| | | SGGGGSGGGGSSYVLTQPPSVSVAPGQTARITCGGNNIGSKSV |
| | | HWYQQKPGQAPVMVVYDDNDRPSGIPERFSGSNSGNTATLTI |
| | | SRVEAGDEADYYCQVWDYVAPRHVFGGGTKLTVLGQPKAA |
| | | PSVTLFPPSSEELQANKATLVCLISDFYPGAVTVAWKADSSPV |
| | | KAGVETTTPSKQSNNKYAASSYLSLTPEQWKSHKSYSCQVTH |
| | | EGSTVEKTVAPTECSSGGGGSEVQLVESGGGLVQPGGSLKLS |
| | | CAASGFTFNKYAMNWVRQAPGKGLEWVARIRSKYNNYATY |
| | | YADSVKDRFTISRDDSKNTAYLQMNNLKTEDTAVYYCVRHG |
| | | NFGNSYISYWAYWGQGTLVTVSSGGGGSGGGGSGGGGSQTV |
| | | VTQEPSLTVSPGGTVTLTCGSSTGAVTSGNYPNWVQQKPGQA |
| | | PRGLIGGTKFLAPGTPARFSGSLLGGKAALTLSGVQPEDEAEY |
| | | YCVLWYSNRWVFGGGTKLTVL |
| 438 | scFab-BiTE | EVQLLESGGGLVQPGGSLRLSCAASGFTFSSHAMSWVRQAPG |
| | HLE | KGLEWVSAISGSGGGTYNAASVKGRFTISRDNSKNTLYLQMN |
| | | SLRAEDTAVYYCATGKGVHLGFDYWGQGTLVTVSSASTKGP |
| | | SVFPLAPSSKSTSGGTAALGCLVKDYFPEPVTVSWNSGALTSG |
| | | VHTFPAVLQSSGLYSLSSVVTVPSSSLGTQTYICNVNHKPSNT |
| | | KVDKKVEPKSCGGGGSGGGGSGGGGSGGGGSGGGGSGGGG |
| | | SGGGGSGGGGSSYVLTQPPSVSVAPGQTARITCGGNNIGSKSV |
| | | HWYQQKPGQAPVMVVYDDNDRPSGIPERFSGSNSGNTATLTI |
| | | SRVEAGDEADYYCQVWDYVAPRHVFGGGTKLTVLGQPKAA |
| | | PSVTLFPPSSEELQANKATLVCLISDFYPGAVTVAWKADSSPV |
| | | KAGVETTTPSKQSNNKYAASSYLSLTPEQWKSHKSYSCQVTH |
| | | EGSTVEKTVAPTECSSGGGGSEVQLVESGGGLVQPGGSLKLS |
| | | CAASGFTFNKYAMNWVRQAPGKGLEWVARIRSKYNNYATY |
| | | YADSVKDRFTISRDDSKNTAYLQMNNLKTEDTAVYYCVRHG |
| | | NFGNSYISYWAYWGQGTLVTVSSGGGGSGGGGSGGGGSQTV |
| | | VTQEPSLTVSPGGTVTLTCGSSTGAVTSGNYPNWVQQKPGQA |
| | | PRGLIGGTKFLAPGTPARFSGSLLGGKAALTLSGVQPEDEAEY |
| | | YCVLWYSNRWVFGGGTKLTVLGGGGDKTHTCPPCPAPELLG |
| | | GPSVFLFPPKPKDTLMISRTPEVTCVVVDVSHEDPEVKFNWYV |
| | | DGVEVHNAKTKPCEEQYGSTYRCVSVLTVLHQDWLNGKEYK |
| | | CKVSNKALPAPIEKTISKAKGQPREPQVYTLPPSREEMTKNQV |
| | | SLTCLVKGFYPSDIAVEWESNGQPENNYKTTPPVLDSDGSFFL |
| | | YSKLTVDKSRWQQGNVFSCSVMHEALHNHYTQKSLSLSPGK |
| | | GGGGSGGGGSGGGGSGGGGSGGGGSGGGGSDKTHTCPPCPA |
| | | PELLGGPSVFLFPPKPKDTLMISRTPEVTCVVVDVSHEDPEVKF |
| | | NWYVDGVEVHNAKTKPCEEQYGSTYRCVSVLTVLHQDWLN |
| | | GKEYKCKVSNKALPAPIEKTISKAKGQPREPQVYTLPPSREEM |
| | | TKNQVSLTCLVKGFYPSDIAVEWESNGQPENNYKTTPPVLDS |
| | | DGSFFLYSKLTVDKSRWQQGNVFSCSVMHEALHNHYTQKSL |
| | | SLSPGK |

MA 86-A4-N-F5 CC scFv × I2C × scFc

| | | |
|---|---|---|
| 439 | HCDR1 | TYGMH |
| 440 | HCDR2 | VISYDAETVKYAESVKG |
| 441 | HCDR3 | GQLLTGY |
| 442 | LCDR1 | RASQGISNYLA |
| 443 | LCDR2 | AASTLQS |
| 444 | LCDR3 | QKYNSAPFT |
| 445 | VH | QVQLVESGGGVVQPGRSLRLSCAASGFTFSTYGMHWVRQAP |
| | | GKCLEWVAVISYDAETVKYAESVKGRFTISRDNSKNTLYLQM |
| | | NSLRAEDTAVYYCARGQLLTGYWGQGTLVTVSS |
| 446 | VL | DIQMTQSPSSLSASVGDRVTITCRASQGISNYLAWYQQKPGKV |
| | | PKLLIYAASTLQSGVPSRFSGSGSGTDFTLTISSLQPEDVATYY |
| | | CQKYNSAPFTFGCGTKVEIK |
| 447 | SCFV | QVQLVESGGGVVQPGRSLRLSCAASGFTFSTYGMHWVRQAP |
| | | GKCLEWVAVISYDAETVKYAESVKGRFTISRDNSKNTLYLQM |
| | | NSLRAEDTAVYYCARGQLLTGYWGQGTLVTVSSGGGGSGGG |
| | | GSGGGGSDIQMTQSPSSLSASVGDRVTITCRASQGISNYLAWY |
| | | QQKPGKVPKLLIYAASTLQSGVPSRFSGSGSGTDFTLTISSLQP |
| | | EDVATYYCQKYNSAPFTFGCGTKVEIK |
| 448 | BISPECIFIC | QVQLVESGGGVVQPGRSLRLSCAASGFTFSTYGMHWVRQAP |
| | MOL. | GKCLEWVAVISYDAETVKYAESVKGRFTISRDNSKNTLYLQM |
| | | NSLRAEDTAVYYCARGQLLTGYWGQGTLVTVSSGGGGSGGG |
| | | GSGGGGSDIQMTQSPSSLSASVGDRVTITCRASQGISNYLAWY |
| | | QQKPGKVPKLLIYAASTLQSGVPSRFSGSGSGTDFTLTISSLQP |
| | | EDVATYYCQKYNSAPFTFGCGTKVEIKSGGGGSEVQLVESGG |
| | | GLVQPGGSLKLSCAASGFTFNKYAMNWVRQAPGKGLEWVA |
| | | RIRSKYNNYATYYADSVKDRFTISRDDSKNTAYLQMNNLKTE |
| | | DTAVYYCVRHGNFGNSYISYWAYWGQGTLVTVSSGGGGSG |
| | | GGGSGGGGSQTVVTQEPSLTVSPGGTVTLTCGSSTGAVTSGN |
| | | YPNWVQQKPGQAPRGLIGGTKFLAPGTPARFSGSLLGGKAAL |
| | | TLSGVQPEDEAEYYCVLWYSNRWVFGGGTKLTVL |
| 449 | BiTE HLE | QVQLVESGGGVVQPGRSLRLSCAASGFTFSTYGMHWVRQAP |
| | | GKCLEWVAVISYDAETVKYAESVKGRFTISRDNSKNTLYLQM |
| | | NSLRAEDTAVYYCARGQLLTGYWGQGTLVTVSSGGGGSGGG |
| | | GSGGGGSDIQMTQSPSSLSASVGDRVTITCRASQGISNYLAWY |
| | | QQKPGKVPKLLIYAASTLQSGVPSRFSGSGSGTDFTLTISSLQP |
| | | EDVATYYCQKYNSAPFTFGCGTKVEIKSGGGGSEVQLVESGG |
| | | GLVQPGGSLKLSCAASGFTFNKYAMNWVRQAPGKGLEWVA |
| | | RIRSKYNNYATYYADSVKDRFTISRDDSKNTAYLQMNNLKTE |
| | | DTAVYYCVRHGNFGNSYISYWAYWGQGTLVTVSSGGGGSG |
| | | GGGSGGGGSQTVVTQEPSLTVSPGGTVTLTCGSSTGAVTSGN |
| | | YPNWVQQKPGQAPRGLIGGTKFLAPGTPARFSGSLLGGKAAL |
| | | TLSGVQPEDEAEYYCVLWYSNRWVFGGGTKLTVLGGGGDKT |
| | | HTCPPCPAPELLGGPSVFLFPPKPKDTLMISRTPEVTCVVVDVS |
| | | HEDPEVKFNWYVDGVEVHNAKTKPCEEQYGSTYRCVSVLTV |
| | | LHQDWLNGKEYKCKVSNKALPAPIEKTISKAKGQPREPQVYT |
| | | LPPSREEMTKNQVSLTCLVKGFYPSDIAVEWESNGQPENNYK |
| | | TTPPVLDSDGSFFLYSKLTVDKSRWQQGNVFSCSVMHEALHN |
| | | HYTQKSLSLSPGKGGGGSGGGGSGGGGSGGGGSGGGGSGGG |
| | | GSDKTHTCPPCPAPELLGGPSVFLFPPKPKDTLMISRTPEVTCV |
| | | VVDVSHEDPEVKFNWYVDGVEVHNAKTKPCEEQYGSTYRCV |
| | | SVLTVLHQDWLNGKEYKCKVSNKALPAPIEKTISKAKGQPRE |
| | | PQVYTLPPSREEMTKNQVSLTCLVKGFYPSDIAVEWESNGQPE |
| | | NNYKTTPPVLDSDGSFFLYSKLTVDKSRWQQGNVFSCSVMHE |
| | | ALHNHYTQKSLSLSPGK |

MA 86-A4-N-F5 scFab × I2C × scFc

| | | |
|---|---|---|
| 450 | VH-CH1 | QVQLVESGGGVVQPGRSLRLSCAASGFTFSTYGMHWVRQAP |
| | | GKGLEWVAVISYDAETVKYAESVKGRFTISRDNSKNTLYLQM |
| | | NSLRAEDTAVYYCARGQLLTGYWGQGTLVTVSSASTKGPSV |
| | | FPLAPSSKSTSGGTAALGCLVKDYFPEPVTVSWNSGALTSGVH |
| | | TFPAVLQSSGLYSLSSVVTVPSSSLGTQTYICNVNHKPSNTKV |
| | | DKKVEPKSC |
| 451 | VL-CL | DIQMTQSPSSLSASVGDRVTITCRASQGISNYLAWYQQKPGKV |
| | | PKLLIYAASTLQSGVPSRFSGSGSGTDFTLTISSLQPEDVATYY |
| | | CQKYNSAPFTFGPGTKVEIKRTVAAPSVFIFPPSDEQLKSGTAS |
| | | VVCLLNNFYPREAKVQWKVDNALQSGNSQESVTEQDSKDST |
| | | YSLSSTLTLSKADYEKHKVYACEVTHQGLSSPVTKSFNRGEC |
| 452 | scFab | QVQLVESGGGVVQPGRSLRLSCAASGFTFSTYGMHWVRQAP |
| | | GKGLEWVAVISYDAETVKYAESVKGRFTISRDNSKNTLYLQM |
| | | NSLRAEDTAVYYCARGQLLTGYWGQGTLVTVSSASTKGPSV |
| | | FPLAPSSKSTSGGTAALGCLVKDYFPEPVTVSWNSGALTSGVH |
| | | TFPAVLQSSGLYSLSSVVTVPSSSLGTQTYICNVNHKPSNTKV |
| | | DKKVEPKSCGGGGSGGGGSGGGGSGGGGSGGGGSGGGGSG |
| | | GGGSGGGGSDIQMTQSPSSLSASVGDRVTITCRASQGISNYLA |
| | | WYQQKPGKVPKLLIYAASTLQSGVPSRFSGSGSGTDFTLTISSL |
| | | QPEDVATYYCQKYNSAPFTFGPGTKVEIKRTVAAPSVFIFPPSD |
| | | EQLKSGTASVVCLLNNFYPREAKVQWKVDNALQSGNSQESV |
| | | TEQDSKDSTYSLSSTLTLSKADYEKHKVYACEVTHQGLSSPVT |
| | | KSFNRGEC |
| 453 | scFab- | QVQLVESGGGVVQPGRSLRLSCAASGFTFSTYGMHWVRQAP |
| | BISPECIFIC | GKGLEWVAVISYDAETVKYAESVKGRFTISRDNSKNTLYLQM |
| | MOL. | NSLRAEDTAVYYCARGQLLTGYWGQGTLVTVSSASTKGPSV |
| | | FPLAPSSKSTSGGTAALGCLVKDYFPEPVTVSWNSGALTSGVH |
| | | TFPAVLQSSGLYSLSSVVTVPSSSLGTQTYICNVNHKPSNTKV |
| | | DKKVEPKSCGGGGSGGGGSGGGGSGGGGSGGGGSGGGGSG |
| | | GGGSGGGGSDIQMTQSPSSLSASVGDRVTITCRASQGISNYLA |
| | | WYQQKPGKVPKLLIYAASTLQSGVPSRFSGSGSGTDFTLTISSL |
| | | QPEDVATYYCQKYNSAPFTFGPGTKVEIKRTVAAPSVFIFPPSD |
| | | EQLKSGTASVVCLLNNFYPREAKVQWKVDNALQSGNSQESV |
| | | TEQDSKDSTYSLSSTLTLSKADYEKHKVYACEVTHQGLSSPVT |
| | | KSFNRGECSGGGGSEVQLVESGGGLVQPGGSLKLSCAASGFT |
| | | FNKYAMNWVRQAPGKGLEWVARIRSKYNNYATYYADSVKD |
| | | RFTISRDDSKNTAYLQMNNLKTEDTAVYYCVRHGNFGNSYIS |
| | | YWAYWGQGTLVTVSSGGGGSGGGGSGGGGSQTVVTQEPSLT |
| | | VSPGGTVTLTCGSSTGAVTSGNYPNWVQQKPGQAPRGLIGGT |
| | | KFLAPGTPARFSGSLLGGKAALTLSGVQPEDEAEYYCVLWYS |
| | | NRWVFGGGTKLTVL |
| 454 | scFab-BiTE | QVQLVESGGGVVQPGRSLRLSCAASGFTFSTYGMHWVRQAP |
| | HLE | GKGLEWVAVISYDAETVKYAESVKGRFTISRDNSKNTLYLQM |
| | | NSLRAEDTAVYYCARGQLLTGYWGQGTLVTVSSASTKGPSV |
| | | FPLAPSSKSTSGGTAALGCLVKDYFPEPVTVSWNSGALTSGVH |
| | | TFPAVLQSSGLYSLSSVVTVPSSSLGTQTYICNVNHKPSNTKV |
| | | DKKVEPKSCGGGGSGGGGSGGGGSGGGGSGGGGSGGGGSG |
| | | GGGSGGGGSDIQMTQSPSSLSASVGDRVTITCRASQGISNYLA |
| | | WYQQKPGKVPKLLIYAASTLQSGVPSRFSGSGSGTDFTLTISSL |
| | | QPEDVATYYCQKYNSAPFTFGPGTKVEIKRTVAAPSVFIFPPSD |
| | | EQLKSGTASVVCLLNNFYPREAKVQWKVDNALQSGNSQESV |
| | | TEQDSKDSTYSLSSTLTLSKADYEKHKVYACEVTHQGLSSPVT |
| | | KSFNRGECSGGGGSEVQLVESGGGLVQPGGSLKLSCAASGFT |
| | | FNKYAMNWVRQAPGKGLEWVARIRSKYNNYATYYADSVKD |
| | | RFTISRDDSKNTAYLQMNNLKTEDTAVYYCVRHGNFGNSYIS |
| | | YWAYWGQGTLVTVSSGGGGSGGGGSGGGGSQTVVTQEPSLT |
| | | VSPGGTVTLTCGSSTGAVTSGNYPNWVQQKPGQAPRGLIGGT |
| | | KFLAPGTPARFSGSLLGGKAALTLSGVQPEDEAEYYCVLWYS |
| | | NRWVFGGGTKLTVLGGGGDKTHTCPPCPAPELLGGPSVFLFP |
| | | PKPKDTLMISRTPEVTCVVVDVSHEDPEVKFNWYVDGVEVH |
| | | NAKTKPCEEQYGSTYRCVSVLTVLHQDWLNGKEYKCKVSNK |
| | | ALPAPIEKTISKAKGQPREPQVYTLPPSREEMTKNQVSLTCLV |
| | | KGFYPSDIAVEWESNGQPENNYKTTPPVLDSDGSFFLYSKLTV |
| | | DKSRWQQGNVFSCSVMHEALHNHYTQKSLSLSPGKGGGGSG |
| | | GGGSGGGGSGGGGSGGGGSGGGGSDKTHTCPPCPAPELLGGP |
| | | SVFLFPPKPKDTLMISRTPEVTCVVVDVSHEDPEVKFNWYVD |
| | | GVEVHNAKTKPCEEQYGSTYRCVSVLTVLHQDWLNGKEYKC |
| | | KVSNKALPAPIEKTISKAKGQPREPQVYTLPPSREEMTKNQVS |
| | | LTCLVKGFYPSDIAVEWESNGQPENNYKTTPPVLDSDGSFFLY |
| | | SKLTVDKSRWQQGNVFSCSVMHEALHNHYTQKSLSLSPGK |

MA 88-B3-F9 CC scFv × I2C × scFc

| | | |
|---|---|---|
| 455 | HCDR1 | DYYMS |
| 456 | HCDR2 | YISKSSYTVTYADAVKG |
| 457 | HCDR3 | YNYGHFDY |
| 458 | LCDR1 | GGNNIGSKSVH |
| 459 | LCDR2 | DDADRPS |
| 460 | LCDR3 | QVWDASAGYGVV |
| 461 | VH | QVQLVESGGGLVKPGGSLRLSCAASGFTFSDYYMSWIRQAPG |
| | | KCLEWVSYISKSSYTVTYADAVKGRFTISRDNAKNSLYLQMN |
| | | SLRAEDTAVYYCATYNYGHFDYWGQGTLVTVSS |
| 462 | VL | SYVLTQPPSVSVAPGQTARITCGGNNIGSKSVHWYQQKPGQA |
| | | PVLVVYDDADRPSGIPERFSGSNSGNTATLTISRVEAGDEADY |
| | | YCQVWDASAGYGVVFGCGTKLTVL |
| 463 | SCFV | QVQLVESGGGLVKPGGSLRLSCAASGFTFSDYYMSWIRQAPG |
| | | KCLEWVSYISKSSYTVTYADAVKGRFTISRDNAKNSLYLQMN |
| | | SLRAEDTAVYYCATYNYGHFDYWGQGTLVTVSSGGGGSGG |
| | | GGSGGGGSSYVLTQPPSVSVAPGQTARITCGGNNIGSKSVHW |
| | | YQQKPGQAPVLVVYDDADRPSGIPERFSGSNSGNTATLTISRV |
| | | EAGDEADYYCQVWDASAGYGVVFGCGTKLTVL |
| 464 | BISPECIFIC | QVQLVESGGGLVKPGGSLRLSCAASGFTFSDYYMSWIRQAPG |
| | MOL. | KCLEWVSYISKSSYTVTYADAVKGRFTISRDNAKNSLYLQMN |
| | | SLRAEDTAVYYCATYNYGHFDYWGQGTLVTVSSGGGGSGG |
| | | GGSGGGGSSYVLTQPPSVSVAPGQTARITCGGNNIGSKSVHW |
| | | YQQKPGQAPVLVVYDDADRPSGIPERFSGSNSGNTATLTISRV |
| | | EAGDEADYYCQVWDASAGYGVVFGCGTKLTVLSGGGGSEV |
| | | QLVESGGGLVQPGGSLKLSCAASGFTFNKYAMNWVRQAPGK |
| | | GLEWVARIRSKYNNYATYYADSVKDRFTISRDDSKNTAYLQ |
| | | MNNLKTEDTAVYYCVRHGNFGNSYISYWAYWGQGTLVTVS |
| | | SGGGGSGGGGSGGGGSQTVVTQEPSLTVSPGGTVTLTCGSST |
| | | GAVTSGNYPNWVQQKPGQAPRGLIGGTKFLAPGTPARFSGSL |
| | | LGGKAALTLSGVQPEDEAEYYCVLWYSNRWVFGGGTKLTVL |
| 465 | BiTE HLE | QVQLVESGGGLVKPGGSLRLSCAASGFTFSDYYMSWIRQAPG |
| | | KCLEWVSYISKSSYTVTYADAVKGRFTISRDNAKNSLYLQMN |
| | | SLRAEDTAVYYCATYNYGHFDYWGQGTLVTVSSGGGGSGG |
| | | GGSGGGGSSYVLTQPPSVSVAPGQTARITCGGNNIGSKSVHW |
| | | YQQKPGQAPVLVVYDDADRPSGIPERFSGSNSGNTATLTISRV |
| | | EAGDEADYYCQVWDASAGYGVVFGCGTKLTVLSGGGGSEV |
| | | QLVESGGGLVQPGGSLKLSCAASGFTFNKYAMNWVRQAPGK |
| | | GLEWVARIRSKYNNYATYYADSVKDRFTISRDDSKNTAYLQ |
| | | MNNLKTEDTAVYYCVRHGNFGNSYISYWAYWGQGTLVTVS |
| | | SGGGGSGGGGSGGGGSQTVVTQEPSLTVSPGGTVTLTCGSST |
| | | GAVTSGNYPNWVQQKPGQAPRGLIGGTKFLAPGTPARFSGSL |
| | | LGGKAALTLSGVQPEDEAEYYCVLWYSNRWVFGGGTKLTVL |
| | | GGGGDKTHTCPPCPAPELLGGPSVFLFPPKPKDTLMISRTPEVT |
| | | CVVVDVSHEDPEVKFNWYVDGVEVHNAKTKPCEEQYGSTYR |
| | | CVSVLTVLHQDWLNGKEYKCKVSNKALPAPIEKTISKAKGQP |
| | | REPQVYTLPPSREEMTKNQVSLTCLVKGFYPSDIAVEWESNG |
| | | QPENNYKTTPPVLDSDGSFFLYSKLTVDKSRWQQGNVFSCSV |
| | | MHEALHNHYTQKSLSLSPGKGGGGSGGGGSGGGGSGGGGSG |
| | | GGGSGGGGSDKTHTCPPCPAPELLGGPSVFLFPPKPKDTLMIS |
| | | RTPEVTCVVVDVSHEDPEVKFNWYVDGVEVHNAKTKPCEEQ |
| | | YGSTYRCVSVLTVLHQDWLNGKEYKCKVSNKALPAPIEKTIS |
| | | KAKGQPREPQVYTLPPSREEMTKNQVSLTCLVKGFYPSDIAVE |
| | | WESNGQPENNYKTTPPVLDSDGSFFLYSKLTVDKSRWQQGN |
| | | VFSCSVMHEALHNHYTQKSLSLSPGK |

MA 88-B3-F9 scFab × I2C × scFc

| | | |
|---|---|---|
| 466 | VH-CH1 | QVQLVESGGGLVKPGGSLRLSCAASGFTFSDYYMSWIRQAPG |
| | | KGLEWVSYISKSSYTVTYADAVKGRFTISRDNAKNSLYLQMN |
| | | SLRAEDTAVYYCATYNYGHFDYWGQGTLVTVSSASTKGPSV |
| | | FPLAPSSKSTSGGTAALGCLVKDYFPEPVTVSWNSGALTSGVH |
| | | TFPAVLQSSGLYSLSSVVTVPSSSLGTQTYICNVNHKPSNTKV |
| | | DKKVEPKSC |
| 467 | VL-CL | SYVLTQPPSVSVAPGQTARITCGGNNIGSKSVHWYQQKPGQA |
| | | PVLVVYDDADRPSGIPERFSGSNSGNTATLTISRVEAGDEADY |
| | | YCQVWDASAGYGVVFGGGTKLTVLGQPKAAPSVTLFPPSSEE |
| | | LQANKATLVCLISDFYPGAVTVAWKADSSPVKAGVETTTPSK |
| | | QSNNKYAASSYLSLTPEQWKSHKSYSCQVTHEGSTVEKTVAP |
| | | TECS |
| 468 | scFab | QVQLVESGGGLVKPGGSLRLSCAASGFTFSDYYMSWIRQAPG |
| | | KGLEWVSYISKSSYTVTYADAVKGRFTISRDNAKNSLYLQMN |
| | | SLRAEDTAVYYCATYNYGHFDYWGQGTLVTVSSASTKGPSV |
| | | FPLAPSSKSTSGGTAALGCLVKDYFPEPVTVSWNSGALTSGVH |
| | | TFPAVLQSSGLYSLSSVVTVPSSSLGTQTYICNVNHKPSNTKV |
| | | DKKVEPKSCGGGGSGGGGSGGGGSGGGGSGGGGSGGGGSG |
| | | GGGSGGGGSSYVLTQPPSVSVAPGQTARITCGGNNIGSKSVH |
| | | WYQQKPGQAPVLVVYDDADRPSGIPERFSGSNSGNTATLTISR |
| | | VEAGDEADYYCQVWDASAGYGVVFGGGTKLTVLGQPKAAP |
| | | SVTLFPPSSEELQANKATLVCLISDFYPGAVTVAWKADSSPVK |
| | | AGVETTTPSKQSNNKYAASSYLSLTPEQWKSHKSYSCQVTHE |
| | | GSTVEKTVAPTECS |
| 469 | scFab- | QVQLVESGGGLVKPGGSLRLSCAASGFTFSDYYMSWIRQAPG |
| | BISPECIFIC | KGLEWVSYISKSSYTVTYADAVKGRFTISRDNAKNSLYLQMN |
| | MOL. | SLRAEDTAVYYCATYNYGHFDYWGQGTLVTVSSASTKGPSV |
| | | FPLAPSSKSTSGGTAALGCLVKDYFPEPVTVSWNSGALTSGVH |
| | | TFPAVLQSSGLYSLSSVVTVPSSSLGTQTYICNVNHKPSNTKV |
| | | DKKVEPKSCGGGGSGGGGSGGGGSGGGGSGGGGSGGGGSG |
| | | GGGSGGGGSSYVLTQPPSVSVAPGQTARITCGGNNIGSKSVH |
| | | WYQQKPGQAPVLVVYDDADRPSGIPERFSGSNSGNTATLTISR |
| | | VEAGDEADYYCQVWDASAGYGVVFGGGTKLTVLGQPKAAP |
| | | SVTLFPPSSEELQANKATLVCLISDFYPGAVTVAWKADSSPVK |
| | | AGVETTTPSKQSNNKYAASSYLSLTPEQWKSHKSYSCQVTHE |
| | | GSTVEKTVAPTECSSGGGGSEVQLVESGGGLVQPGGSLKLSC |
| | | AASGFTFNKYAMNWVRQAPGKGLEWVARIRSKYNNYATYY |
| | | ADSVKDRFTISRDDSKNTAYLQMNNLKTEDTAVYYCVRHGN |
| | | FGNSYISYWAYWGQGTLVTVSSGGGGSGGGGSGGGGSQTVV |
| | | TQEPSLTVSPGGTVTLTCGSSTGAVTSGNYPNWVQQKPGQAP |
| | | RGLIGGTKFLAPGTPARFSGSLLGGKAALTLSGVQPEDEAEYY |
| | | CVLWYSNRWVFGGGTKLTVL |
| 470 | scFab-BiTE | QVQLVESGGGLVKPGGSLRLSCAASGFTFSDYYMSWIRQAPG |
| | HLE | KGLEWVSYISKSSYTVTYADAVKGRFTISRDNAKNSLYLQMN |
| | | SLRAEDTAVYYCATYNYGHFDYWGQGTLVTVSSASTKGPSV |
| | | FPLAPSSKSTSGGTAALGCLVKDYFPEPVTVSWNSGALTSGVH |
| | | TFPAVLQSSGLYSLSSVVTVPSSSLGTQTYICNVNHKPSNTKV |
| | | DKKVEPKSCGGGGSGGGGSGGGGSGGGGSGGGGSGGGGSG |
| | | GGGSGGGGSSYVLTQPPSVSVAPGQTARITCGGNNIGSKSVH |
| | | WYQQKPGQAPVLVVYDDADRPSGIPERFSGSNSGNTATLTISR |
| | | VEAGDEADYYCQVWDASAGYGVVFGGGTKLTVLGQPKAAP |
| | | SVTLFPPSSEELQANKATLVCLISDFYPGAVTVAWKADSSPVK |
| | | AGVETTTPSKQSNNKYAASSYLSLTPEQWKSHKSYSCQVTHE |
| | | GSTVEKTVAPTECSSGGGGSEVQLVESGGGLVQPGGSLKLSC |
| | | AASGFTFNKYAMNWVRQAPGKGLEWVARIRSKYNNYATYY |
| | | ADSVKDRFTISRDDSKNTAYLQMNNLKTEDTAVYYCVRHGN |
| | | FGNSYISYWAYWGQGTLVTVSSGGGGSGGGGSGGGGSQTVV |
| | | TQEPSLTVSPGGTVTLTCGSSTGAVTSGNYPNWVQQKPGQAP |
| | | RGLIGGTKFLAPGTPARFSGSLLGGKAALTLSGVQPEDEAEYY |
| | | CVLWYSNRWVFGGGTKLTVLGGGGDKTHTCPPCPAPELLGG |
| | | PSVFLFPPKPKDTLMISRTPEVTCVVVDVSHEDPEVKFNWYVD |
| | | GVEVHNAKTKPCEEQYGSTYRCVSVLTVLHQDWLNGKEYKC |
| | | KVSNKALPAPIEKTISKAKGQPREPQVYTLPPSREEMTKNQVS |
| | | LTCLVKGFYPSDIAVEWESNGQPENNYKTTPPVLDSDGSFFLY |
| | | SKLTVDKSRWQQGNVFSCSVMHEALHNHYTQKSLSLSPGKG |
| | | GGGSGGGGSGGGGSGGGGSGGGGSGGGGSDKTHTCPPCPAP |
| | | ELLGGPSVFLFPPKPKDTLMISRTPEVTCVVVDVSHEDPEVKF |
| | | NWYVDGVEVHNAKTKPCEEQYGSTYRCVSVLTVLHQDWLNG |
| | | KEYKCKVSNKALPAPIEKTISKAKGQPREPQVYTLPPSREEM |
| | | TKNQVSLTCLVKGFYPSDIAVEWESNGQPENNYKTTPPVLDS |
| | | DGSFFLYSKLTVDKSRWQQGNVFSCSVMHEALHNHYTQKSL |
| | | SLSPGK |

MA SG-F28 CC scFv × I2C × scFc

| | | |
|---|---|---|
| 471 | HCDR1 | SNPYYWS |
| 472 | HCDR2 | YISYSGITNYNPSLKS |
| 473 | HCDR3 | EKMWFGVLNYYYGMDV |
| 474 | LCDR1 | RSSQSLLHRSGYNYLD |
| 475 | LCDR2 | LGSNRAS |
| 476 | LCDR3 | MQALQTPWT |
| 477 | VH | QVQLQESGPGLVKPSQTLSLTCTVSGDSISSNPYYWSWIRQHP |
| | | GKCLEWIGYISYSGITNYNPSLKSRVTMSVDTSKNQFSLKLTS |
| | | LTAADTAVYYCAREKMWFGVLNYYYGMDVWGQGTTVTVS |
| | | S |
| 478 | VL | DIVMTQTPLSLPVTPGEPASISCRSSQSLLHRSGYNYLDWYLQ |
| | | KPGQSPQLLIYLGSNRASGVPDRFSGSGSGTDFTLKISRVEAGD |
| | | VGVYYCMQALQTPWTFGCGTKVEIK |
| 479 | SCFV | QVQLQESGPGLVKPSQTLSLTCTVSGDSISSNPYYWSWIRQHP |
| | | GKCLEWIGYISYSGITNYNPSLKSRVTMSVDTSKNQFSLKLTS |
| | | LTAADTAVYYCAREKMWFGVLNYYYGMDVWGQGTTVTVS |
| | | SGGGGSGGGGSGGGGSDIVMTQTPLSLPVTPGEPASISCRSSQS |
| | | LLHRSGYNYLDWYLQKPGQSPQLLIYLGSNRASGVPDRFSGS |
| | | GSGTDFTLKISRVEAGDVGVYYCMQALQTPWTFGCGTKVEIK |
| 480 | BISPECIFIC | QVQLQESGPGLVKPSQTLSLTCTVSGDSISSNPYYWSWIRQHP |
| | MOL. | GKCLEWIGYISYSGITNYNPSLKSRVTMSVDTSKNQFSLKLTS |
| | | LTAADTAVYYCAREKMWFGVLNYYYGMDVWGQGTTVTVS |
| | | SGGGGSGGGGSGGGGSDIVMTQTPLSLPVTPGEPASISCRSSQS |
| | | LLHRSGYNYLDWYLQKPGQSPQLLIYLGSNRASGVPDRFSGS |
| | | GSGTDFTLKISRVEAGDVGVYYCMQALQTPWTFGCGTKVEIK |
| | | SGGGGSEVQLVESGGGLVQPGGSLKLSCAASGFTFNKYAMN |
| | | WVRQAPGKGLEWVARIRSKYNNYATYYADSVKDRFTISRDD |
| | | SKNTAYLQMNNLKTEDTAVYYCVRHGNFGNSYISYWAYWG |
| | | QGTLVTVSSGGGGSGGGGSGGGGSQTVVTQEPSLTVSPGGTV |
| | | TLTCGSSTGAVTSGNYPNWVQQKPGQAPRGLIGGTKFLAPGT |
| | | PARFSGSLLGGKAALTLSGVQPEDEAEYYCVLWYSNRWVFG |
| | | GGTKLTVL |
| 481 | BiTE HLE | QVQLQESGPGLVKPSQTLSLTCTVSGDSISSNPYYWSWIRQHP |
| | | GKCLEWIGYISYSGITNYNPSLKSRVTMSVDTSKNQFSLKLTS |
| | | LTAADTAVYYCAREKMWFGVLNYYYGMDVWGQGTTVTVS |
| | | SGGGGSGGGGSGGGGSDIVMTQTPLSLPVTPGEPASISCRSSQS |
| | | LLHRSGYNYLDWYLQKPGQSPQLLIYLGSNRASGVPDRFSGS |
| | | GSGTDFTLKISRVEAGDVGVYYCMQALQTPWTFGCGTKVEIK |
| | | SGGGGSEVQLVESGGGLVQPGGSLKLSCAASGFTFNKYAMN |
| | | WVRQAPGKGLEWVARIRSKYNNYATYYADSVKDRFTISRDD |
| | | SKNTAYLQMNNLKTEDTAVYYCVRHGNFGNSYISYWAYWG |
| | | QGTLVTVSSGGGGSGGGGSGGGGSQTVVTQEPSLTVSPGGTV |
| | | TLTCGSSTGAVTSGNYPNWVQQKPGQAPRGLIGGTKFLAPGT |
| | | PARFSGSLLGGKAALTLSGVQPEDEAEYYCVLWYSNRWVFG |
| | | GGTKLTVLGGGGDKTHTCPPCPAPELLGGPSVFLFPPKPKDTL |
| | | MISRTPEVTCVVVDVSHEDPEVKFNWYVDGVEVHNAKTKPC |
| | | EEQYGSTYRCVSVLTVLHQDWLNGKEYKCKVSNKALPAPIEK |
| | | TISKAKGQPREPQVYTLPPSREEMTKNQVSLTCLVKGFYPSDI |
| | | AVEWESNGQPENNYKTTPPVLDSDGSFFLYSKLTVDKSRWQQ |
| | | GNVFSCSVMHEALHNHYTQKSLSLSPGKGGGGSGGGGSGGG |
| | | GSGGGGSGGGGSGGGGSDKTHTCPPCPAPELLGGPSVFLFPPK |
| | | PKDTLMISRTPEVTCVVVDVSHEDPEVKFNWYVDGVEVHNA |
| | | KTKPCEEQYGSTYRCVSVLTVLHQDWLNGKEYKCKVSNKAL |
| | | PAPIEKTISKAKGQPREPQVYTLPPSREEMTKNQVSLTCLVKG |
| | | FYPSDIAVEWESNGQPENNYKTTPPVLDSDGSFFLYSKLTVDK |
| | | SRWQQGNVFSCSVMHEALHNHYTQKSLSLSPGK |

MA SG-F28 scFab × I2C × scFc

| | | |
|---|---|---|
| 482 | VH-CH1 | QVQLQESGPGLVKPSQTLSLTCTVSGDSISSNPYYWSWIRQHP |
| | | GKGLEWIGYISYSGITNYNPSLKSRVTMSVDTSKNQFSLKLTS |
| | | LTAADTAVYYCAREKMWFGVLNYYYGMDVWGQGTTVTVS |
| | | SASTKGPSVFPLAPSSKSTSGGTAALGCLVKDYFPEPVTVSWN |
| | | SGALTSGVHTFPAVLQSSGLYSLSSVVTVPSSSLGTQTYICNVN |
| | | HKPSNTKVDKKVEPKSC |
| 483 | VL-CL | DIVMTQTPLSLPVTPGEPASISCRSSQSLLHRSGYNYLDWYLQ |
| | | KPGQSPQLLIYLGSNRASGVPDRFSGSGSGTDFTLKISRVEAGD |
| | | VGVYYCMQALQTPWTFGQGTKVEIKRTVAAPSVFIFPPSDEQ |
| | | LKSGTASVVCLLNNFYPREAKVQWKVDNALQSGNSQESVTE |
| | | QDSKDSTYSLSSTLTLSKADYEKHKVYACEVTHQGLSSPVTK |
| | | SFNRGEC |
| 484 | scFab | QVQLQESGPGLVKPSQTLSLTCTVSGDSISSNPYYWSWIRQHP |
| | | GKGLEWIGYISYSGITNYNPSLKSRVTMSVDTSKNQFSLKLTS |
| | | LTAADTAVYYCAREKMWFGVLNYYYGMDVWGQGTTVTVS |
| | | SASTKGPSVFPLAPSSKSTSGGTAALGCLVKDYFPEPVTVSWN |
| | | SGALTSGVHTFPAVLQSSGLYSLSSVVTVPSSSLGTQTYICNVN |
| | | HKPSNTKVDKKVEPKSCGGGGSGGGGSGGGGSGGGGSGGGG |
| | | SGGGGSGGGGSGGGGSDIVMTQTPLSLPVTPGEPASISCRSSQS |
| | | LLHRSGYNYLDWYLQKPGQSPQLLIYLGSNRASGVPDRFSGS |
| | | GSGTDFTLKISRVEAGDVGVYYCMQALQTPWTFGQGTKVEIK |
| | | RTVAAPSVFIFPPSDEQLKSGTASVVCLLNNFYPREAKVQWK |
| | | VDNALQSGNSQESVTEQDSKDSTYSLSSTLTLSKADYEKHKV |
| | | YACEVTHQGLSSPVTKSFNRGEC |
| 485 | scFab- | QVQLQESGPGLVKPSQTLSLTCTVSGDSISSNPYYWSWIRQHP |
| | BISPECIFIC | GKGLEWIGYISYSGITNYNPSLKSRVTMSVDTSKNQFSLKLTS |
| | MOL. | LTAADTAVYYCAREKMWFGVLNYYYGMDVWGQGTTVTVS |
| | | SASTKGPSVFPLAPSSKSTSGGTAALGCLVKDYFPEPVTVSWN |
| | | SGALTSGVHTFPAVLQSSGLYSLSSVVTVPSSSLGTQTYICNVN |
| | | HKPSNTKVDKKVEPKSCGGGGSGGGGSGGGGSGGGGSGGGG |
| | | SGGGGSGGGGSGGGGSDIVMTQTPLSLPVTPGEPASISCRSSQS |
| | | LLHRSGYNYLDWYLQKPGQSPQLLIYLGSNRASGVPDRFSGS |
| | | GSGTDFTLKISRVEAGDVGVYYCMQALQTPWTFGQGTKVEIK |
| | | RTVAAPSVFIFPPSDEQLKSGTASVVCLLNNFYPREAKVQWK |
| | | VDNALQSGNSQESVTEQDSKDSTYSLSSTLTLSKADYEKHKV |
| | | YACEVTHQGLSSPVTKSFNRGECSGGGGSEVQLVESGGGLVQ |
| | | PGGSLKLSCAASGFTFNKYAMNWVRQAPGKGLEWVARIRSK |
| | | YNNYATYYADSVKDRFTISRDDSKNTAYLQMNNLKTEDTAV |
| | | YYCVRHGNFGNSYISYWAYWGQGTLVTVSSGGGGSGGGGSG |
| | | GGGSQTVVTQEPSLTVSPGGTVTLTCGSSTGAVTSGNYPNWV |
| | | QQKPGQAPRGLIGGTKFLAPGTPARFSGSLLGGKAALTLSGVQ |
| | | PEDEAEYYCVLWYSNRWVFGGGTKLTVL |
| 486 | scFab-BiTE | QVQLQESGPGLVKPSQTLSLTCTVSGDSISSNPYYWSWIRQHP |
| | HLE | GKGLEWIGYISYSGITNYNPSLKSRVTMSVDTSKNQFSLKLTS |
| | | LTAADTAVYYCAREKMWFGVLNYYYGMDVWGQGTTVTVS |
| | | SASTKGPSVFPLAPSSKSTSGGTAALGCLVKDYFPEPVTVSWN |
| | | SGALTSGVHTFPAVLQSSGLYSLSSVVTVPSSSLGTQTYICNVN |
| | | HKPSNTKVDKKVEPKSCGGGGSGGGGSGGGGSGGGGSGGGG |
| | | SGGGGSGGGGSGGGGSDIVMTQTPLSLPVTPGEPASISCRSSQS |
| | | LLHRSGYNYLDWYLQKPGQSPQLLIYLGSNRASGVPDRFSGS |
| | | GSGTDFTLKISRVEAGDVGVYYCMQALQTPWTFGQGTKVEIK |
| | | RTVAAPSVFIFPPSDEQLKSGTASVVCLLNNFYPREAKVQWK |
| | | VDNALQSGNSQESVTEQDSKDSTYSLSSTLTLSKADYEKHKV |
| | | YACEVTHQGLSSPVTKSFNRGECSGGGGSEVQLVESGGGLVQ |
| | | PGGSLKLSCAASGFTFNKYAMNWVRQAPGKGLEWVARIRSK |
| | | YNNYATYYADSVKDRFTISRDDSKNTAYLQMNNLKTEDTAV |
| | | YYCVRHGNFGNSYISYWAYWGQGTLVTVSSGGGGSGGGGSG |
| | | GGGSQTVVTQEPSLTVSPGGTVTLTCGSSTGAVTSGNYPNWV |
| | | QQKPGQAPRGLIGGTKFLAPGTPARFSGSLLGGKAALTLSGVQ |
| | | PEDEAEYYCVLWYSNRWVFGGGTKLTVLGGGGDKTHTCPPC |
| | | PAPELLGGPSVFLFPPKPKDTLMISRTPEVTCVVVDVSHEDPEV |
| | | KFNWYVDGVEVHNAKTKPCEEQYGSTYRCVSVLTVLHQDW |
| | | LNGKEYKCKVSNKALPAPIEKTISKAKGQPREPQVYTLPPSRE |
| | | EMTKNQVSLTCLVKGFYPSDIAVEWESNGQPENNYKTTPPVL |
| | | DSDGSFFLYSKLTVDKSRWQQGNVFSCSVMHEALHNHYTQK |
| | | SLSLSPGKGGGGSGGGGSGGGGSGGGGSGGGGSGGGGSDKT |
| | | HTCPPCPAPELLGGPSVFLFPPKPKDTLMISRTPEVTCVVVDVS |
| | | HEDPEVKFNWYVDGVEVHNAKTKPCEEQYGSTYRCVSVLTV |
| | | LHQDWLNGKEYKCKVSNKALPAPIEKTISKAKGQPREPQVYT |
| | | LPPSREEMTKNQVSLTCLVKGFYPSDIAVEWESNGQPENNYK |
| | | TTPPVLDSDGSFFLYSKLTVDKSRWQQGNVFSCSVMHEALHN |
| | | HYTQKSLSLSPGK |

MA 03-G10 AS CC scFv × I2C × scFc

| | | |
|---|---|---|
| 487 | HCDR1 | SYAMS |
| 488 | HCDR2 | AISGSGGGTYYAASVKG |
| 489 | HCDR3 | GKGVHLGFDY |
| 490 | LCDR1 | GGNNIGSKSVH |
| 491 | LCDR2 | DDNDRPS |
| 492 | LCDR3 | QVWDYSGQRQV |
| 493 | VH | EVQLLESGGGLVQPGGSLRLSCAASGFTFSSYAMSWVRQAPG |
| | | KCLEWVSAISGSGGGTYYAASVKGRFTISRDNSKNTLYLQMS |
| | | SLRAEDTAVYYCATGKGVHLGFDYWGQGTLVTVSS |
| 494 | VL | SYVLTQPPSVSVAPGQTARITCGGNNIGSKSVHWYQQKPGQA |
| | | PVMVVYDDNDRPSGIPERFSGSNSGNTATLTISRVEAGDEADY |
| | | YCQVWDYSGQRQVFGCGTKLTVL |
| 495 | SCFV | EVQLLESGGGLVQPGGSLRLSCAASGFTFSSYAMSWVRQAPG |
| | | KCLEWVSAISGSGGGTYYAASVKGRFTISRDNSKNTLYLQMS |
| | | SLRAEDTAVYYCATGKGVHLGFDYWGQGTLVTVSSGGGGSG |
| | | GGGSGGGGSSYVLTQPPSVSVAPGQTARITCGGNNIGSKSVH |
| | | WYQQKPGQAPVMVVYDDNDRPSGIPERFSGSNSGNTATLTIS |
| | | RVEAGDEADYYCQVWDYSGQRQVFGCGTKLTVL |
| 496 | BISPECIFIC | EVQLLESGGGLVQPGGSLRLSCAASGFTFSSYAMSWVRQAPG |
| | MOL. | KCLEWVSAISGSGGGTYYAASVKGRFTISRDNSKNTLYLQMS |
| | | SLRAEDTAVYYCATGKGVHLGFDYWGQGTLVTVSSGGGGSG |
| | | GGGSGGGGSSYVLTQPPSVSVAPGQTARITCGGNNIGSKSVH |
| | | WYQQKPGQAPVMVVYDDNDRPSGIPERFSGSNSGNTATLTIS |
| | | RVEAGDEADYYCQVWDYSGQRQVFGCGTKLTVLSGGGGSE |
| | | VQLVESGGGLVQPGGSLKLSCAASGFTFNKYAMNWVRQAPG |
| | | KGLEWVARIRSKYNNYATYYADSVKDRFTISRDDSKNTAYLQ |
| | | MNNLKTEDTAVYYCVRHGNFGNSYISYWAYWGQGTLVTVS |
| | | SGGGGSGGGGSGGGGSQTVVTQEPSLTVSPGGTVTLTCGSST |
| | | GAVTSGNYPNWVQQKPGQAPRGLIGGTKFLAPGTPARFSGSL |
| | | LGGKAALTLSGVQPEDEAEYYCVLWYSNRWVFGGGTKLTVL |
| 497 | BiTE HLE | EVQLLESGGGLVQPGGSLRLSCAASGFTFSSYAMSWVRQAPG |
| | | KCLEWVSAISGSGGGTYYAASVKGRFTISRDNSKNTLYLQMS |
| | | SLRAEDTAVYYCATGKGVHLGFDYWGQGTLVTVSSGGGGSG |
| | | GGGSGGGGSSYVLTQPPSVSVAPGQTARITCGGNNIGSKSVH |
| | | WYQQKPGQAPVMVVYDDNDRPSGIPERFSGSNSGNTATLTIS |
| | | RVEAGDEADYYCQVWDYSGQRQVFGCGTKLTVLSGGGGSE |
| | | VQLVESGGGLVQPGGSLKLSCAASGFTFNKYAMNWVRQAPG |
| | | KGLEWVARIRSKYNNYATYYADSVKDRFTISRDDSKNTAYLQ |
| | | MNNLKTEDTAVYYCVRHGNFGNSYISYWAYWGQGTLVTVS |
| | | SGGGGSGGGGSGGGGSQTVVTQEPSLTVSPGGTVTLTCGSST |
| | | GAVTSGNYPNWVQQKPGQAPRGLIGGTKFLAPGTPARFSGSL |
| | | LGGKAALTLSGVQPEDEAEYYCVLWYSNRWVFGGGTKLTVL |
| | | GGGGDKTHTCPPCPAPELLGGPSVFLFPPKPKDTLMISRTPEVT |
| | | CVVVDVSHEDPEVKFNWYVDGVEVHNAKTKPCEEQYGSTYR |
| | | CVSVLTVLHQDWLNGKEYKCKVSNKALPAPIEKTISKAKGQP |
| | | REPQVYTLPPSREEMTKNQVSLTCLVKGFYPSDIAVEWESNG |
| | | QPENNYKTTPPVLDSDGSFFLYSKLTVDKSRWQQGNVFSCSV |
| | | MHEALHNHYTQKSLSLSPGKGGGGSGGGGSGGGGSGGGGSG |
| | | GGGSGGGGSDKTHTCPPCPAPELLGGPSVFLFPPKPKDTLMIS |
| | | RTPEVTCVVVDVSHEDPEVKFNWYVDGVEVHNAKTKPCEEQ |
| | | YGSTYRCVSVLTVLHQDWLNGKEYKCKVSNKALPAPIEKTIS |
| | | KAKGQPREPQVYTLPPSREEMTKNQVSLTCLVKGFYPSDIAVE |
| | | WESNGQPENNYKTTPPVLDSDGSFFLYSKLTVDKSRWQQGN |
| | | VFSCSVMHEALHNHYTQKSLSLSPGK |

MA 03-G10 AS scFab × I2C × scFc

| | | |
|---|---|---|
| 498 | VH-CH1 | EVQLLESGGGLVQPGGSLRLSCAASGFTFSSYAMSWVRQAPG |
| | | KGLEWVSAISGSGGGTYYAASVKGRFTISRDNSKNTLYLQMS |
| | | SLRAEDTAVYYCATGKGVHLGFDYWGQGTLVTVSSASTKGP |
| | | SVFPLAPSSKSTSGGTAALGCLVKDYFPEPVTVSWNSGALTSG |
| | | VHTFPAVLQSSGLYSLSSVVTVPSSSLGTQTYICNVNHKPSNT |
| | | KVDKKVEPKSC |
| 499 | VL | SYVLTQPPSVSVAPGQTARITCGGNNIGSKSVHWYQQKPGQA |
| | | PVMVVYDDNDRPSGIPERFSGSNSGNTATLTISRVEAGDEADY |
| | | YCQVWDYSGQRQVFGGGTKLTVL |
| 500 | scFab | EVQLLESGGGLVQPGGSLRLSCAASGFTFSSYAMSWVRQAPG |
| | | KGLEWVSAISGSGGGTYYAASVKGRFTISRDNSKNTLYLQMS |
| | | SLRAEDTAVYYCATGKGVHLGFDYWGQGTLVTVSSASTKGP |
| | | SVFPLAPSSKSTSGGTAALGCLVKDYFPEPVTVSWNSGALTSG |
| | | VHTFPAVLQSSGLYSLSSVVTVPSSSLGTQTYICNVNHKPSNT |
| | | KVDKKVEPKSCGGGGSGGGGSGGGGSGGGGSGGGGSGGGG |
| | | SGGGGSGGGGSSYVLTQPPSVSVAPGQTARITCGGNNIGSKSV |
| | | HWYQQKPGQAPVMVVYDDNDRPSGIPERFSGSNSGNTATLTI |
| | | SRVEAGDEADYYCQVWDYSGQRQVFGGGTKLTVL |
| 501 | scFab- | EVQLLESGGGLVQPGGSLRLSCAASGFTFSSYAMSWVRQAPG |
| | BISPECIFIC | KGLEWVSAISGSGGGTYYAASVKGRFTISRDNSKNTLYLQMS |
| | MOL. | SLRAEDTAVYYCATGKGVHLGFDYWGQGTLVTVSSASTKGP |
| | | SVFPLAPSSKSTSGGTAALGCLVKDYFPEPVTVSWNSGALTSG |
| | | VHTFPAVLQSSGLYSLSSVVTVPSSSLGTQTYICNVNHKPSNT |
| | | KVDKKVEPKSCGGGGSGGGGSGGGGSGGGGSGGGGSGGGG |
| | | SGGGGSGGGGSSYVLTQPPSVSVAPGQTARITCGGNNIGSKSV |
| | | HWYQQKPGQAPVMVVYDDNDRPSGIPERFSGSNSGNTATLTI |
| | | SRVEAGDEADYYCQVWDYSGQRQVFGGGTKLTVLSGGGGSE |
| | | VQLVESGGGLVQPGGSLKLSCAASGFTFNKYAMNWVRQAPG |
| | | KGLEWVARIRSKYNNYATYYADSVKDRFTISRDDSKNTAYLQ |
| 502 | scFab-BiTE | MNNLKTEDTAVYYCVRHGNFGNSYISYWAYWGQGTLVTVS |
| | HLE | SGGGGSGGGGSGGGGSQTVVTQEPSLTVSPGGTVTLTCGSST |
| | | GAVTSGNYPNWVQQKPGQAPRGLIGGTKFLAPGTPARFSGSL |
| | | LGGKAALTLSGVQPEDEAEYYCVLWYSNRWVFGGGTKLTVL |
| | | EVQLLESGGGLVQPGGSLRLSCAASGFTFSSYAMSWVRQAPG |
| | | KGLEWVSAISGSGGGTYYAASVKGRFTISRDNSKNTLYLQMS |
| | | SLRAEDTAVYYCATGKGVHLGFDYWGQGTLVTVSSASTKGP |
| | | SVFPLAPSSKSTSGGTAALGCLVKDYFPEPVTVSWNSGALTSG |
| | | VHTFPAVLQSSGLYSLSSVVTVPSSSLGTQTYICNVNHKPSNT |
| | | KVDKKVEPKSCGGGGSGGGGSGGGGSGGGGSGGGGSGGGG |
| | | SGGGGSGGGGSSYVLTQPPSVSVAPGQTARITCGGNNIGSKSV |
| | | HWYQQKPGQAPVMVVYDDNDRPSGIPERFSGSNSGNTATLTI |
| | | SRVEAGDEADYYCQVWDYSGQRQVFGGGTKLTVLSGGGGSE |
| | | VQLVESGGGLVQPGGSLKLSCAASGFTFNKYAMNWVRQAPG |
| | | KGLEWVARIRSKYNNYATYYADSVKDRFTISRDDSKNTAYLQ |
| | | MNNLKTEDTAVYYCVRHGNFGNSYISYWAYWGQGTLVTVS |
| | | SGGGGSGGGGSGGGGSQTVVTQEPSLTVSPGGTVTLTCGSST |
| | | GAVTSGNYPNWVQQKPGQAPRGLIGGTKFLAPGTPARFSGSL |
| | | LGGKAALTLSGVQPEDEAEYYCVLWYSNRWVFGGGTKLTVL |
| | | GGGGDKTHTCPPCPAPELLGGPSVFLFPPKPKDTLMISRTPEVT |
| | | CVVVDVSHEDPEVKFNWYVDGVEVHNAKTKPCEEQYGSTYR |
| | | CVSVLTVLHQDWLNGKEYKCKVSNKALPAPIEKTISKAKGQP |
| | | REPQVYTLPPSREEMTKNQVSLTCLVKGFYPSDIAVEWESNG |
| | | QPENNYKTTPPVLDSDGSFFLYSKLTVDKSRWQQGNVFSCSV |
| | | MHEALHNHYTQKSLSLSPGKGGGGSGGGGSGGGGSGGGGSG |
| | | GGGSGGGGSDKTHTCPPCPAPELLGGPSVFLFPPKPKDTLMIS |
| | | RTPEVTCVVVDVSHEDPEVKFNWYVDGVEVHNAKTKPCEEQ |
| | | YGSTYRCVSVLTVLHQDWLNGKEYKCKVSNKALPAPIEKTIS |
| | | KAKGQPREPQVYTLPPSREEMTKNQVSLTCLVKGFYPSDIAVE |
| | | WESNGQPENNYKTTPPVLDSDGSFFLYSKLTVDKSRWQQGN |
| | | VFSCSVMHEALHNHYTQKSLSLSPGK |

MA 10-B5 CC scFv × I2C × scFc

| | | |
|---|---|---|
| 503 | HCDR1 | NAWMS |
| 504 | HCDR2 | RIRSRSYGGTTDYAAPVKG |
| 505 | HCDR3 | PSYSGSYYNYFSVMDV |
| 506 | LCDR1 | RTSQSISSYLN |
| 507 | LCDR2 | AASSLQG |
| 508 | LCDR3 | QQTYSMPFT |
| 509 | VH | EVQLVESGGGLVQPGGSLRLSCAASGFTFSNAWMSWVRQAP |
| | | GKCLEWVGRIRSRSYGGTTDYAAPVKGRFTISRDDSKNTLFL |
| | | QMNSLKTEDTAVYYCTTPSYSGSYYNYFSVMDVWGQGTTVT |
| | | VSS |
| 510 | VL | DIQMTQSPSSLSASVGDRVTITCRTSQSISSYLNWYQQKPGRA |
| | | PKLLIFAASSLQGGVPSRFSGSGSGTDFTLTISSLQPEDFATYYC |
| | | QQTYSMPFTFGCGTKVEIK |
| 511 | SCFV | EVQLVESGGGLVQPGGSLRLSCAASGFTFSNAWMSWVRQAP |
| | | GKCLEWVGRIRSRSYGGTTDYAAPVKGRFTISRDDSKNTLFL |
| | | QMNSLKTEDTAVYYCTTPSYSGSYYNYFSVMDVWGQGTTVT |
| | | VSSGGGGSGGGGSGGGGSDIQMTQSPSSLSASVGDRVTITCRT |
| | | SQSISSYLNWYQQKPGRAPKLLIFAASSLQGGVPSRFSGSGSGT |
| | | DFTLTISSLQPEDFATYYCQQTYSMPFTFGCGTKVEIK |
| 512 | BISPECIFIC | EVQLVESGGGLVQPGGSLRLSCAASGFTFSNAWMSWVRQAP |
| | MOL. | GKCLEWVGRIRSRSYGGTTDYAAPVKGRFTISRDDSKNTLFL |
| | | QMNSLKTEDTAVYYCTTPSYSGSYYNYFSVMDVWGQGTTVT |
| | | VSSGGGGSGGGGSGGGGSDIQMTQSPSSLSASVGDRVTITCRT |
| | | SQSISSYLNWYQQKPGRAPKLLIFAASSLQGGVPSRFSGSGSGT |
| | | DFTLTISSLQPEDFATYYCQQTYSMPFTFGCGTKVEIKSGGGG |
| | | SEVQLVESGGGLVQPGGSLKLSCAASGFTFNKYAMNWVRQA |
| | | PGKGLEWVARIRSKYNNYATYYADSVKDRFTISRDDSKNTAY |
| | | LQMNNLKTEDTAVYYCVRHGNFGNSYISYWAYWGQGTLVT |
| | | VSSGGGGSGGGGSGGGGSQTVVTQEPSLTVSPGGTVTLTCGS |
| | | STGAVTSGNYPNWVQQKPGQAPRGLIGGTKFLAPGTPARFSG |
| | | SLLGGKAALTLSGVQPEDEAEYYCVLWYSNRWVFGGGTKLT |
| | | VL |
| 513 | BiTE HLE | EVQLVESGGGLVQPGGSLRLSCAASGFTFSNAWMSWVRQAP |
| | | GKCLEWVGRIRSRSYGGTTDYAAPVKGRFTISRDDSKNTLFL |
| | | QMNSLKTEDTAVYYCTTPSYSGSYYNYFSVMDVWGQGTTVT |
| | | VSSGGGGSGGGGSGGGGSDIQMTQSPSSLSASVGDRVTITCRT |
| | | SQSISSYLNWYQQKPGRAPKLLIFAASSLQGGVPSRFSGSGSGT |
| | | DFTLTISSLQPEDFATYYCQQTYSMPFTFGCGTKVEIKSGGGG |
| | | SEVQLVESGGGLVQPGGSLKLSCAASGFTFNKYAMNWVRQA |
| | | PGKGLEWVARIRSKYNNYATYYADSVKDRFTISRDDSKNTAY |
| | | LQMNNLKTEDTAVYYCVRHGNFGNSYISYWAYWGQGTLVT |
| | | VSSGGGGSGGGGSGGGGSQTVVTQEPSLTVSPGGTVTLTCGS |
| | | STGAVTSGNYPNWVQQKPGQAPRGLIGGTKFLAPGTPARFSG |
| | | SLLGGKAALTLSGVQPEDEAEYYCVLWYSNRWVFGGGTKLT |
| | | VLGGGGDKTHTCPPCPAPELLGGPSVFLFPPKPKDTLMISRTPE |
| | | VTCVVVDVSHEDPEVKFNWYVDGVEVHNAKTKPCEEQYGST |
| | | YRCVSVLTVLHQDWLNGKEYKCKVSNKALPAPIEKTISKAKG |
| | | QPREPQVYTLPPSREEMTKNQVSLTCLVKGFYPSDIAVEWESN |
| | | GQPENNYKTTPPVLDSDGSFFLYSKLTVDKSRWQQGNVFSCS |
| | | VMHEALHNHYTQKSLSLSPGKGGGGSGGGGSGGGGSGGGGS |
| | | GGGGSGGGGSDKTHTCPPCPAPELLGGPSVFLFPPKPKDTLMI |
| | | SRTPEVTCVVVDVSHEDPEVKFNWYVDGVEVHNAKTKPCEE |
| | | QYGSTYRCVSVLTVLHQDWLNGKEYKCKVSNKALPAPIEKTI |
| | | SKAKGQPREPQVYTLPPSREEMTKNQVSLTCLVKGFYPSDIAV |
| | | EWESNGQPENNYKTTPPVLDSDGSFFLYSKLTVDKSRWQQGN |
| | | VFSCSVMHEALHNHYTQKSLSLSPGK |

MA 10-B5 scFab × I2C × scFc

| | | |
|---|---|---|
| 514 | VH-CH1 | EVQLVESGGGLVQPGGSLRLSCAASGFTFSNAWMSWVRQAP |
| | | GKGLEWVGRIRSRSYGGTTDYAAPVKGRFTISRDDSKNTLFL |
| | | QMNSLKTEDTAVYYCTTPSYSGSYYNYFSVMDVWGQGTTVT |
| | | VSSASTKGPSVFPLAPSSKSTSGGTAALGCLVKDYFPEPVTVS |
| | | WNSGALTSGVHTFPAVLQSSGLYSLSSVVTVPSSSLGTQTYIC |
| | | NVNHKPSNTKVDKKVEPKSC |
| 515 | VL-CL | DIQMTQSPSSLSASVGDRVTITCRTSQSISSYLNWYQQKPGRA |
| | | PKLLIFAASSLQGGVPSRFSGSGSGTDFTLTISSLQPEDFATYYC |
| | | QQTYSMPFTFGGGTKVEIKRTVAAPSVFIFPPSDEQLKSGTASV |
| | | VCLLNNFYPREAKVQWKVDNALQSGNSQESVTEQDSKDSTY |
| | | SLSSTLTLSKADYEKHKVYACEVTHQGLSSPVTKSFNRGEC |
| 516 | scFab | EVQLVESGGGLVQPGGSLRLSCAASGFTFSNAWMSWVRQAP |
| | | GKGLEWVGRIRSRSYGGTTDYAAPVKGRFTISRDDSKNTLFL |
| | | QMNSLKTEDTAVYYCTTPSYSGSYYNYFSVMDVWGQGTTVT |
| | | VSSASTKGPSVFPLAPSSKSTSGGTAALGCLVKDYFPEPVTVS |
| | | WNSGALTSGVHTFPAVLQSSGLYSLSSVVTVPSSSLGTQTYIC |
| | | NVNHKPSNTKVDKKVEPKSCGGGGSGGGGSGGGGSGGGGSG |
| | | GGGSGGGGSGGGGSGGGGSDIQMTQSPSSLSASVGDRVTITC |
| | | RTSQSISSYLNWYQQKPGRAPKLLIFAASSLQGGVPSRFSGSGS |
| | | GTDFTLTISSLQPEDFATYYCQQTYSMPFTFGGGTKVEIKRTV |
| | | AAPSVFIFPPSDEQLKSGTASVVCLLNNFYPREAKVQWKVDN |
| | | ALQSGNSQESVTEQDSKDSTYSLSSTLTLSKADYEKHKVYAC |
| | | EVTHQGLSSPVTKSFNRGEC |
| 517 | scFab- | EVQLVESGGGLVQPGGSLRLSCAASGFTFSNAWMSWVRQAP |
| | BISPECIFIC | GKGLEWVGRIRSRSYGGTTDYAAPVKGRFTISRDDSKNTLFL |
| | MOL. | QMNSLKTEDTAVYYCTTPSYSGSYYNYFSVMDVWGQGTTVT |
| | | VSSASTKGPSVFPLAPSSKSTSGGTAALGCLVKDYFPEPVTVS |
| | | WNSGALTSGVHTFPAVLQSSGLYSLSSVVTVPSSSLGTQTYIC |
| | | NVNHKPSNTKVDKKVEPKSCGGGGSGGGGSGGGGSGGGGSG |
| | | GGGSGGGGSGGGGSGGGGSDIQMTQSPSSLSASVGDRVTITC |
| | | RTSQSISSYLNWYQQKPGRAPKLLIFAASSLQGGVPSRFSGSGS |
| | | GTDFTLTISSLQPEDFATYYCQQTYSMPFTFGGGTKVEIKRTV |
| | | AAPSVFIFPPSDEQLKSGTASVVCLLNNFYPREAKVQWKVDN |
| | | ALQSGNSQESVTEQDSKDSTYSLSSTLTLSKADYEKHKVYAC |
| | | EVTHQGLSSPVTKSFNRGECSGGGGSEVQLVESGGGLVQPGG |
| | | SLKLSCAASGFTFNKYAMNWVRQAPGKGLEWVARIRSKYNN |
| | | YATYYADSVKDRFTISRDDSKNTAYLQMNNLKTEDTAVYYC |
| | | VRHGNFGNSYISYWAYWGQGTLVTVSSGGGGSGGGGSGGG |
| | | GSQTVVTQEPSLTVSPGGTVTLTCGSSTGAVTSGNYPNWVQQ |
| | | KPGQAPRGLIGGTKFLAPGTPARFSGSLLGGKAALTLSGVQPE |
| | | DEAEYYCVLWYSNRWVFGGGTKLTVL |
| 518 | scFab-BiTE | EVQLVESGGGLVQPGGSLRLSCAASGFTFSNAWMSWVRQAP |
| | HLE | GKGLEWVGRIRSRSYGGTTDYAAPVKGRFTISRDDSKNTLFL |
| | | QMNSLKTEDTAVYYCTTPSYSGSYYNYFSVMDVWGQGTTVT |
| | | VSSASTKGPSVFPLAPSSKSTSGGTAALGCLVKDYFPEPVTVS |
| | | WNSGALTSGVHTFPAVLQSSGLYSLSSVVTVPSSSLGTQTYIC |
| | | NVNHKPSNTKVDKKVEPKSCGGGGSGGGGSGGGGSGGGGSG |
| | | GGGSGGGGSGGGGSGGGGSDIQMTQSPSSLSASVGDRVTITC |
| | | RTSQSISSYLNWYQQKPGRAPKLLIFAASSLQGGVPSRFSGSGS |
| | | GTDFTLTISSLQPEDFATYYCQQTYSMPFTFGGGTKVEIKRTV |
| | | AAPSVFIFPPSDEQLKSGTASVVCLLNNFYPREAKVQWKVDN |
| | | ALQSGNSQESVTEQDSKDSTYSLSSTLTLSKADYEKHKVYAC |
| | | EVTHQGLSSPVTKSFNRGECSGGGGSEVQLVESGGGLVQPGG |
| | | SLKLSCAASGFTFNKYAMNWVRQAPGKGLEWVARIRSKYNN |
| | | YATYYADSVKDRFTISRDDSKNTAYLQMNNLKTEDTAVYYC |
| | | VRHGNFGNSYISYWAYWGQGTLVTVSSGGGGSGGGGSGGG |
| | | GSQTVVTQEPSLTVSPGGTVTLTCGSSTGAVTSGNYPNWVQQ |
| | | KPGQAPRGLIGGTKFLAPGTPARFSGSLLGGKAALTLSGVQPE |
| | | DEAEYYCVLWYSNRWVFGGGTKLTVLGGGGDKTHTCPPCPA |
| | | PELLGGPSVFLFPPKPKDTLMISRTPEVTCVVVDVSHEDPEVKF |
| | | NWYVDGVEVHNAKTKPCEEQYGSTYRCVSVLTVLHQDWLN |
| | | GKEYKCKVSNKALPAPIEKTISKAKGQPREPQVYTLPPSREEM |
| | | TKNQVSLTCLVKGFYPSDIAVEWESNGQPENNYKTTPPVLDS |
| | | DGSFFLYSKLTVDKSRWQQGNVFSCSVMHEALHNHYTQKSL |
| | | SLSPGKGGGGSGGGGSGGGGSGGGGSGGGGSGGGGSDKTHT |
| | | CPPCPAPELLGGPSVFLFPPKPKDTLMISRTPEVTCVVVDVSHE |
| | | DPEVKFNWYVDGVEVHNAKTKPCEEQYGSTYRCVSVLTVLH |
| | | QDWLNGKEYKCKVSNKALPAPIEKTISKAKGQPREPQVYTLP |
| | | PSREEMTKNQVSLTCLVKGFYPSDIAVEWESNGQPENNYKTT |
| | | PPVLDSDGSFFLYSKLTVDKSRWQQGNVFSCSVMHEALHNH |
| | | YTQKSLSLSPGK |

CD22 11-C3 CC scFv × I2C × scFc

| | | |
|---|---|---|
| 519 | HCDR1 | SFYWS |
| 520 | HCDR2 | RISSSGDVDYNPSLKS |
| 521 | HCDR3 | EGGFYY |
| 522 | LCDR1 | RASQSVSSSYLA |
| 523 | LCDR2 | GASSRAT |
| 524 | LCDR3 | QQYGSSPIT |
| 525 | VH | QVQLQESGPGLVKPSETLSLTCTVSGGSISSFYWSWIRQPPGK |
| | | CLEWIGRISSSGDVDYNPSLKSRVTISVDTSKNQFSLKLSSVTA |
| | | ADTAVYYCAREGGFYYWGQGTLVTVSS |
| 526 | VL | EIVLTQSPGTLSLSPGERATLSCRASQSVSSSYLAWYQQKPGQ |
| | | APRLLIYGASSRATGIPDRFSGSGSGTDFTLTISRLEPEDFAVYY |
| | | CQQYGSSPITFGCGTKLEIK |
| 527 | SCFV | QVQLQESGPGLVKPSETLSLTCTVSGGSISSFYWSWIRQPPGK |
| | | CLEWIGRISSSGDVDYNPSLKSRVTISVDTSKNQFSLKLSSVTA |
| | | ADTAVYYCAREGGFYYWGQGTLVTVSSGGGGSGGGGSGGG |
| | | GSEIVLTQSPGTLSLSPGERATLSCRASQSVSSSYLAWYQQKP |
| | | GQAPRLLIYGASSRATGIPDRFSGSGSGTDFTLTISRLEPEDFAV |
| | | YYCQQYGSSPITFGCGTKLEIK |
| 528 | BISPECIFIC | QVQLQESGPGLVKPSETLSLTCTVSGGSISSFYWSWIRQPPGK |
| | MOL. | CLEWIGRISSSGDVDYNPSLKSRVTISVDTSKNQFSLKLSSVTA |
| | | ADTAVYYCAREGGFYYWGQGTLVTVSSGGGGSGGGGSGGG |
| | | GSEIVLTQSPGTLSLSPGERATLSCRASQSVSSSYLAWYQQKP |
| | | GQAPRLLIYGASSRATGIPDRFSGSGSGTDFTLTISRLEPEDFAV |
| | | YYCQQYGSSPITFGCGTKLEIKSGGGGSEVQLVESGGGLVQPG |
| | | GSLKLSCAASGFTFNKYAMNWVRQAPGKGLEWVARIRSKYN |
| | | NYATYYADSVKDRFTISRDDSKNTAYLQMNNLKTEDTAVYY |
| | | CVRHGNFGNSYISYWAYWGQGTLVTVSSGGGGSGGGGSGGG |
| | | GSQTVVTQEPSLTVSPGGTVTLTCGSSTGAVTSGNYPNWVQQ |
| | | KPGQAPRGLIGGTKFLAPGTPARFSGSLLGGKAALTLSGVQPE |
| | | DEAEYYCVLWYSNRWVFGGGTKLTVL |
| 529 | BiTE HLE | QVQLQESGPGLVKPSETLSLTCTVSGGSISSFYWSWIRQPPGK |
| | | CLEWIGRISSSGDVDYNPSLKSRVTISVDTSKNQFSLKLSSVTA |
| | | ADTAVYYCAREGGFYYWGQGTLVTVSSGGGGSGGGGSGGG |
| | | GSEIVLTQSPGTLSLSPGERATLSCRASQSVSSSYLAWYQQKP |
| | | GQAPRLLIYGASSRATGIPDRFSGSGSGTDFTLTISRLEPEDFAV |
| | | YYCQQYGSSPITFGCGTKLEIKSGGGGSEVQLVESGGGLVQPG |
| | | GSLKLSCAASGFTFNKYAMNWVRQAPGKGLEWVARIRSKYN |
| | | NYATYYADSVKDRFTISRDDSKNTAYLQMNNLKTEDTAVYY |
| | | CVRHGNFGNSYISYWAYWGQGTLVTVSSGGGGSGGGGSGGG |
| | | GSQTVVTQEPSLTVSPGGTVTLTCGSSTGAVTSGNYPNWVQQ |
| | | KPGQAPRGLIGGTKFLAPGTPARFSGSLLGGKAALTLSGVQPE |
| | | DEAEYYCVLWYSNRWVFGGGTKLTVLGGGGDKTHTCPPCPA |
| | | PELLGGPSVFLFPPKPKDTLMISRTPEVTCVVVDVSHEDPEVKF |
| | | NWYVDGVEVHNAKTKPCEEQYGSTYRCVSVLTVLHQDWLN |
| | | GKEYKCKVSNKALPAPIEKTISKAKGQPREPQVYTLPPSREEM |
| | | TKNQVSLTCLVKGFYPSDIAVEWESNGQPENNYKTTPPVLDS |
| | | DGSFFLYSKLTVDKSRWQQGNVFSCSVMHEALHNHYTQKSL |
| | | SLSPGKGGGGSGGGGSGGGGSGGGGSGGGGSGGGGSDKTHT |
| | | CPPCPAPELLGGPSVFLFPPKPKDTLMISRTPEVTCVVVDVSHE |
| | | DPEVKFNWYVDGVEVHNAKTKPCEEQYGSTYRCVSVLTVLH |
| | | QDWLNGKEYKCKVSNKALPAPIEKTISKAKGQPREPQVYTLP |
| | | PSREEMTKNQVSLTCLVKGFYPSDIAVEWESNGQPENNYKTT |
| | | PPVLDSDGSFFLYSKLTVDKSRWQQGNVFSCSVMHEALHNH |
| | | YTQKSLSLSPGK |

CD20 29-F5 CC scFv × I2C × scFc

| | | |
|---|---|---|
| 530 | HCDR1 | GYYWS |
| 531 | HCDR2 | EINHRGSTNYNPSLKS |
| 532 | HCDR3 | GYSSSWYTGYVFDY |
| 533 | LCDR1 | TGTSSDVFGYDYVS |
| 534 | LCDR2 | DVSNRPS |
| 535 | LCDR3 | SSYKSSSTVV |
| 536 | VH | QVQLQQWGAGLLKPSETLSLTCAVYGGSFSGYYWSWIRQPP |
| | | GKCLEWIGEINHRGSTNYNPSLKSRVTISGDTSKNQFSLKLSSV |
| | | NAADTAVYYCARGYSSSWYTGYVFDYWGQGTLVTVSS |
| 537 | VL | QSALTQPASVSGSPGQSITISCTGTSSDVFGYDYVSWYQQHPG |
| | | KAPKLMIYDVSNRPSGVSNRFSGSKSGNAASLTISGLQAEDEA |
| | | DYYCSSYKSSSTVVFGCGTKLTVL |
| 538 | SCFV | QVQLQQWGAGLLKPSETLSLTCAVYGGSFSGYYWSWIRQPP |
| | | GKCLEWIGEINHRGSTNYNPSLKSRVTISGDTSKNQFSLKLSSV |
| | | NAADTAVYYCARGYSSSWYTGYVFDYWGQGTLVTVSSGGG |
| | | GSGGGGSGGGGSQSALTQPASVSGSPGQSITISCTGTSSDVFGY |
| | | DYVSWYQQHPGKAPKLMIYDVSNRPSGVSNRFSGSKSGNAA |
| | | SLTISGLQAEDEADYYCSSYKSSSTVVFGCGTKLTVL |
| 539 | BISPECIFIC | QVQLQQWGAGLLKPSETLSLTCAVYGGSFSGYYWSWIRQPP |
| | MOL. | GKCLEWIGEINHRGSTNYNPSLKSRVTISGDTSKNQFSLKLSSV |
| | | NAADTAVYYCARGYSSSWYTGYVFDYWGQGTLVTVSSGGG |
| | | GSGGGGSGGGGSQSALTQPASVSGSPGQSITISCTGTSSDVFGY |
| | | DYVSWYQQHPGKAPKLMIYDVSNRPSGVSNRFSGSKSGNAA |
| | | SLTISGLQAEDEADYYCSSYKSSSTVVFGCGTKLTVLSGGGGS |
| | | EVQLVESGGGLVQPGGSLKLSCAASGFTFNKYAMNWVRQAP |
| | | GKGLEWVARIRSKYNNYATYYADSVKDRFTISRDDSKNTAYL |
| | | QMNNLKTEDTAVYYCVRHGNFGNSYISYWAYWGQGTLVTV |
| | | SSGGGGSGGGGSGGGGSQTVVTQEPSLTVSPGGTVTLTCGSST |
| | | GAVTSGNYPNWVQQKPGQAPRGLIGGTKFLAPGTPARFSGSL |
| | | LGGKAALTLSGVQPEDEAEYYCVLWYSNRWVFGGGTKLTVL |
| 540 | BiTE HLE | QVQLQQWGAGLLKPSETLSLTCAVYGGSFSGYYWSWIRQPP |
| | | GKCLEWIGEINHRGSTNYNPSLKSRVTISGDTSKNQFSLKLSSV |
| | | NAADTAVYYCARGYSSSWYTGYVFDYWGQGTLVTVSSGGG |
| | | GSGGGGSGGGGSQSALTQPASVSGSPGQSITISCTGTSSDVFGY |
| | | DYVSWYQQHPGKAPKLMIYDVSNRPSGVSNRFSGSKSGNAA |
| | | SLTISGLQAEDEADYYCSSYKSSSTVVFGCGTKLTVLSGGGGS |
| | | EVQLVESGGGLVQPGGSLKLSCAASGFTFNKYAMNWVRQAP |
| | | GKGLEWVARIRSKYNNYATYYADSVKDRFTISRDDSKNTAYL |
| | | QMNNLKTEDTAVYYCVRHGNFGNSYISYWAYWGQGTLVTV |
| | | SSGGGGSGGGGSGGGGSQTVVTQEPSLTVSPGGTVTLTCGSST |
| | | GAVTSGNYPNWVQQKPGQAPRGLIGGTKFLAPGTPARFSGSL |
| | | LGGKAALTLSGVQPEDEAEYYCVLWYSNRWVFGGGTKLTVL |
| | | GGGGDKTHTCPPCPAPELLGGPSVFLFPPKPKDTLMISRTPEVT |
| | | CVVVDVSHEDPEVKFNWYVDGVEVHNAKTKPCEEQYGSTYR |
| | | CVSVLTVLHQDWLNGKEYKCKVSNKALPAPIEKTISKAKGQP |
| | | REPQVYTLPPSREEMTKNQVSLTCLVKGFYPSDIAVEWESNG |
| | | QPENNYKTTPPVLDSDGSFFLYSKLTVDKSRWQQGNVFSCSV |
| | | MHEALHNHYTQKSLSLSPGKGGGGSGGGGSGGGGSGGGGSG |
| | | GGGSGGGGSDKTHTCPPCPAPELLGGPSVFLFPPKPKDTLMIS |
| | | RTPEVTCVVVDVSHEDPEVKFNWYVDGVEVHNAKTKPCEEQ |
| | | YGSTYRCVSVLTVLHQDWLNGKEYKCKVSNKALPAPIEKTIS |
| | | KAKGQPREPQVYTLPPSREEMTKNQVSLTCLVKGFYPSDIAVE |
| | | WESNGQPENNYKTTPPVLDSDGSFFLYSKLTVDKSRWQQGN |
| | | VFSCSVMHEALHNHYTQKSLSLSPGK |

CD22 28-B7 N655 CC scFv × I2C × scFc

| | | |
|---|---|---|
| 541 | HCDR1 | SYGIS |
| 542 | HCDR2 | WISAYSGNAIYAQKLQG |
| 543 | HCDR3 | DPDYYGSGSYSDY |
| 544 | LCDR1 | RASQSVSSNLA |
| 545 | LCDR2 | GASSRAT |
| 546 | LCDR3 | QQYHSWPLLT |
| 547 | VH | QVQLVQSGAEVKKPGASVKVSCKASGYTFTSYGISWVRQAP |
| | | GQCLEWMGWISAYSGNAIYAQKLQGRVTMTRDTSTSTAYME |
| | | LRSLRSDDTAVYYCARDPDYYGSGSYSDYWGQGTLVTVSS |
| 548 | VL | EIVLTQSPATLSVSPGERATLSCRASQSVSSNLAWYQQKPGQA |
| | | PRLLIYGASSRATGIPARFSGSGSGTEFTLTISSLQSEDFAVYYC |
| | | QQYHSWPLLTFGCGTKVEIK |
| 549 | SCFV | QVQLVQSGAEVKKPGASVKVSCKASGYTFTSYGISWVRQAP |
| | | GQCLEWMGWISAYSGNAIYAQKLQGRVTMTRDTSTSTAYME |
| | | LRSLRSDDTAVYYCARDPDYYGSGSYSDYWGQGTLVTVSSG |
| | | GGGSGGGGSGGGGSEIVLTQSPATLSVSPGERATLSCRASQSV |
| | | SSNLAWYQQKPGQAPRLLIYGASSRATGIPARFSGSGSGTEFT |
| | | LTISSLQSEDFAVYYCQQYHSWPLLTFGCGTKVEIK |
| 550 | BISPECIFIC | QVQLVQSGAEVKKPGASVKVSCKASGYTFTSYGISWVRQAP |
| | MOL. | GQCLEWMGWISAYSGNAIYAQKLQGRVTMTRDTSTSTAYME |
| | | LRSLRSDDTAVYYCARDPDYYGSGSYSDYWGQGTLVTVSSG |
| | | GGGSGGGGSGGGGSEIVLTQSPATLSVSPGERATLSCRASQSV |
| | | SSNLAWYQQKPGQAPRLLIYGASSRATGIPARFSGSGSGTEFT |
| | | LTISSLQSEDFAVYYCQQYHSWPLLTFGCGTKVEIKSGGGGSE |
| 551 | BiTE HLE | VQLVESGGGLVQPGGSLKLSCAASGFTFNKYAMNWVRQAPG |
| | | KGLEWVARIRSKYNNYATYYADSVKDRFTISRDDSKNTAYLQ |
| | | MNNLKTEDTAVYYCVRHGNFGNSYISYWAYWGQGTLVTVS |
| | | SGGGGSGGGGSGGGGSQTVVTQEPSLTVSPGGTVTLTCGSST |
| | | GAVTSGNYPNWVQQKPGQAPRGLIGGTKFLAPGTPARFSGSL |
| | | LGGKAALTLSGVQPEDEAEYYCVLWYSNRWVFGGGTKLTVL |
| | | QVQLVQSGAEVKKPGASVKVSCKASGYTFTSYGISWVRQAP |
| | | GQCLEWMGWISAYSGNAIYAQKLQGRVTMTRDTSTSTAYME |
| | | LRSLRSDDTAVYYCARDPDYYGSGSYSDYWGQGTLVTVSSG |
| | | GGGSGGGGSGGGGSEIVLTQSPATLSVSPGERATLSCRASQSV |
| | | SSNLAWYQQKPGQAPRLLIYGASSRATGIPARFSGSGSGTEFT |
| | | LTISSLQSEDFAVYYCQQYHSWPLLTFGCGTKVEIKSGGGGSE |
| | | VQLVESGGGLVQPGGSLKLSCAASGFTFNKYAMNWVRQAPG |
| | | KGLEWVARIRSKYNNYATYYADSVKDRFTISRDDSKNTAYLQ |
| | | MNNLKTEDTAVYYCVRHGNFGNSYISYWAYWGQGTLVTVS |
| | | SGGGGSGGGGSGGGGSQTVVTQEPSLTVSPGGTVTLTCGSST |
| | | GAVTSGNYPNWVQQKPGQAPRGLIGGTKFLAPGTPARFSGSL |
| | | LGGKAALTLSGVQPEDEAEYYCVLWYSNRWVFGGGTKLTVL |
| | | GGGGDKTHTCPPCPAPELLGGPSVFLFPPKPKDTLMISRTPEVT |
| | | CVVVDVSHEDPEVKFNWYVDGVEVHNAKTKPCEEQYGSTYR |
| | | CVSVLTVLHQDWLNGKEYKCKVSNKALPAPIEKTISKAKGQP |
| | | REPQVYTLPPSREEMTKNQVSLTCLVKGFYPSDIAVEWESNG |
| | | QPENNYKTTPPVLDSDGSFFLYSKLTVDKSRWQQGNVFSCSV |
| | | MHEALHNHYTQKSLSLSPGKGGGGSGGGGSGGGGSGGGGSG |
| | | GGGSGGGGSDKTHTCPPCPAPELLGGPSVFLFPPKPKDTLMIS |
| | | RTPEVTCVVVDVSHEDPEVKFNWYVDGVEVHNAKTKPCEEQ |
| | | YGSTYRCVSVLTVLHQDWLNGKEYKCKVSNKALPAPIEKTIS |
| | | KAKGQPREPQVYTLPPSREEMTKNQVSLTCLVKGFYPSDIAVE |
| | | WESNGQPENNYKTTPPVLDSDGSFFLYSKLTVDKSRWQQGN |
| | | VFSCSVMHEALHNHYTQKSLSLSPGK |

CD20 99-E5 CC scFv × I2C × scFc

| | | |
|---|---|---|
| 552 | HCDR1 | SYWMH |
| 553 | HCDR2 | YITPSTGYTEYNQKFKG |
| 554 | HCDR3 | VHDYDRAMEY |
| 555 | LCDR1 | KASQDINKYIA |
| 556 | LCDR2 | YTSTLQP |
| 557 | LCDR3 | LQYASYPFT |
| 558 | VH | QVQLVQSGAEVKKPGASVKVSCKASGYTFTSYWMHWVRQA |
| | | PGQCLEWIGYITPSTGYTEYNQKFKGRVTMTRDKSTSTVYME |
| | | LSSLTSEDTAVYYCARVHDYDRAMEYWGQGTTVTVSS |
| 559 | VL | DIQMTQSPSSLSASVGDRVTITCKASQDINKYIAWYQQKPGKG |
| | | PKLLIYYTSTLQPGVPSRFSGSGSGTDFTFTISSLQPEDIATYYC |
| | | LQYASYPFTFGCGTRLEIK |
| 560 | SCFV | QVQLVQSGAEVKKPGASVKVSCKASGYTFTSYWMHWVRQA |
| | | PGQCLEWIGYITPSTGYTEYNQKFKGRVTMTRDKSTSTVYME |
| | | LSSLTSEDTAVYYCARVHDYDRAMEYWGQGTTVTVSSGGGG |
| | | SGGGGSGGGGSDIQMTQSPSSLSASVGDRVTITCKASQDINKY |
| | | IAWYQQKPGKGPKLLIYYTSTLQPGVPSRFSGSGSGTDFTFTIS |
| | | SLQPEDIATYYCLQYASYPFTFGCGTRLEIK |
| 561 | BISPECIFIC | QVQLVQSGAEVKKPGASVKVSCKASGYTFTSYWMHWVRQA |
| | MOL. | PGQCLEWIGYITPSTGYTEYNQKFKGRVTMTRDKSTSTVYME |
| | | LSSLTSEDTAVYYCARVHDYDRAMEYWGQGTTVTVSSGGGG |
| | | SGGGGSGGGGSDIQMTQSPSSLSASVGDRVTITCKASQDINKY |
| | | IAWYQQKPGKGPKLLIYYTSTLQPGVPSRFSGSGSGTDFTFTIS |
| | | SLQPEDIATYYCLQYASYPFTFGCGTRLEIKSGGGGSEVQLVE |
| | | SGGGLVQPGGSLKLSCAASGFTFNKYAMNWVRQAPGKGLE |
| | | WVARIRSKYNNYATYYADSVKDRFTISRDDSKNTAYLQMNN |
| | | LKTEDTAVYYCVRHGNFGNSYISYWAYWGQGTLVTVSSGGG |
| | | GSGGGGSGGGGSQTVVTQEPSLTVSPGGTVTLTCGSSTGAVT |
| | | SGNYPNWVQQKPGQAPRGLIGGTKFLAPGTPARFSGSLLGGK |
| | | AALTLSGVQPEDEAEYYCVLWYSNRWVFGGGTKLTVL |
| 562 | BiTE HLE | QVQLVQSGAEVKKPGASVKVSCKASGYTFTSYWMHWVRQA |
| | | PGQCLEWIGYITPSTGYTEYNQKFKGRVTMTRDKSTSTVYME |
| | | LSSLTSEDTAVYYCARVHDYDRAMEYWGQGTTVTVSSGGGG |
| | | SGGGGSGGGGSDIQMTQSPSSLSASVGDRVTITCKASQDINKY |
| | | IAWYQQKPGKGPKLLIYYTSTLQPGVPSRFSGSGSGTDFTFTIS |
| | | SLQPEDIATYYCLQYASYPFTFGCGTRLEIKSGGGGSEVQLVE |
| | | SGGGLVQPGGSLKLSCAASGFTFNKYAMNWVRQAPGKGLE |
| | | WVARIRSKYNNYATYYADSVKDRFTISRDDSKNTAYLQMNN |
| | | LKTEDTAVYYCVRHGNFGNSYISYWAYWGQGTLVTVSSGGG |
| | | GSGGGGSGGGGSQTVVTQEPSLTVSPGGTVTLTCGSSTGAVT |
| | | SGNYPNWVQQKPGQAPRGLIGGTKFLAPGTPARFSGSLLGGK |
| | | AALTLSGVQPEDEAEYYCVLWYSNRWVFGGGTKLTVLGGGG |
| | | DKTHTCPPCPAPELLGGPSVFLFPPKPKDTLMISRTPEVTCVVV |
| | | DVSHEDPEVKFNWYVDGVEVHNAKTKPCEEQYGSTYRCVSV |
| | | LTVLHQDWLNGKEYKCKVSNKALPAPIEKTISKAKGQPREPQ |
| | | VYTLPPSREEMTKNQVSLTCLVKGFYPSDIAVEWESNGQPEN |
| | | NYKTTPPVLDSDGSFFLYSKLTVDKSRWQQGNVFSCSVMHEA |
| | | LHNHYTQKSLSLSPGKGGGGSGGGGSGGGGSGGGGSGGGGS |
| | | GGGGSDKTHTCPPCPAPELLGGPSVFLFPPKPKDTLMISRTPEV |
| | | TCVVVDVSHEDPEVKFNWYVDGVEVHNAKTKPCEEQYGSTY |
| | | RCVSVLTVLHQDWLNGKEYKCKVSNKALPAPIEKTISKAKGQ |
| | | PREPQVYTLPPSREEMTKNQVSLTCLVKGFYPSDIAVEWESNG |
| | | QPENNYKTTPPVLDSDGSFFLYSKLTVDKSRWQQGNVFSCSV |
| | | MHEALHNHYTQKSLSLSPGK |

CD20 99-E5 scFab × I2C × scFc

| | | |
|---|---|---|
| 563 | VH-CH1 | QVQLVQSGAEVKKPGASVKVSCKASGYTFTSYWMHWVRQA |
| | | PGQGLEWIGYITPSTGYTEYNQKFKGRVTMTRDKSTSTVYME |
| | | LSSLTSEDTAVYYCARVHDYDRAMEYWGQGTTVTVSSASTK |
| | | GPSVFPLAPSSKSTSGGTAALGCLVKDYFPEPVTVSWNSGALT |
| | | SGVHTFPAVLQSSGLYSLSSVVTVPSSSLGTQTYICNVNHKPS |
| | | NTKVDKKVEPKSC |
| 564 | VL-CL | DIQMTQSPSSLSASVGDRVTITCKASQDINKYIAWYQQKPGKG |
| | | PKLLIYYTSTLQPGVPSRFSGSGSGTDFTFTISSLQPEDIATYYC |
| | | LQYASYPFTFGQGTRLEIKRTVAAPSVFIFPPSDEQLKSGTASV |
| | | VCLLNNFYPREAKVQWKVDNALQSGNSQESVTEQDSKDSTY |
| | | SLSSTLTLSKADYEKHKVYACEVTHQGLSSPVTKSFNRGEC |
| 565 | scFab | QVQLVQSGAEVKKPGASVKVSCKASGYTFTSYWMHWVRQA |
| | | PGQGLEWIGYITPSTGYTEYNQKFKGRVTMTRDKSTSTVYME |
| | | LSSLTSEDTAVYYCARVHDYDRAMEYWGQGTTVTVSSASTK |
| | | GPSVFPLAPSSKSTSGGTAALGCLVKDYFPEPVTVSWNSGALT |
| | | SGVHTFPAVLQSSGLYSLSSVVTVPSSSLGTQTYICNVNHKPS |
| | | NTKVDKKVEPKSCGGGGSGGGGSGGGGSGGGGSGGGGSGG |
| | | GGSGGGGSGGGGSDIQMTQSPSSLSASVGDRVTITCKASQDIN |
| | | KYIAWYQQKPGKGPKLLIYYTSTLQPGVPSRFSGSGSGTDFTF |
| | | TISSLQPEDIATYYCLQYASYPFTFGQGTRLEIKRTVAAPSVFIF |
| | | PPSDEQLKSGTASVVCLLNNFYPREAKVQWKVDNALQSGNS |
| | | QESVTEQDSKDSTYSLSSTLTLSKADYEKHKVYACEVTHQGL |
| | | SSPVTKSFNRGEC |
| 566 | scFab- | QVQLVQSGAEVKKPGASVKVSCKASGYTFTSYWMHWVRQA |
| | BISPECIFIC | PGQGLEWIGYITPSTGYTEYNQKFKGRVTMTRDKSTSTVYME |
| | MOL. | LSSLTSEDTAVYYCARVHDYDRAMEYWGQGTTVTVSSASTK |
| | | GPSVFPLAPSSKSTSGGTAALGCLVKDYFPEPVTVSWNSGALT |
| | | SGVHTFPAVLQSSGLYSLSSVVTVPSSSLGTQTYICNVNHKPS |
| | | NTKVDKKVEPKSCGGGGSGGGGSGGGGSGGGGSGGGGSGG |
| | | GGSGGGGSGGGGSDIQMTQSPSSLSASVGDRVTITCKASQDIN |
| | | KYIAWYQQKPGKGPKLLIYYTSTLQPGVPSRFSGSGSGTDFTF |
| | | TISSLQPEDIATYYCLQYASYPFTFGQGTRLEIKRTVAAPSVFIF |
| | | PPSDEQLKSGTASVVCLLNNFYPREAKVQWKVDNALQSGNS |
| | | QESVTEQDSKDSTYSLSSTLTLSKADYEKHKVYACEVTHQGL |
| | | SSPVTKSFNRGECSGGGGSEVQLVESGGGLVQPGGSLKLSCA |
| | | ASGFTFNKYAMNWVRQAPGKGLEWVARIRSKYNNYATYYA |
| | | DSVKDRFTISRDDSKNTAYLQMNNLKTEDTAVYYCVRHGNF |
| | | GNSYISYWAYWGQGTLVTVSSGGGGSGGGGSGGGGSQTVVT |
| | | QEPSLTVSPGGTVTLTCGSSTGAVTSGNYPNWVQQKPGQAPR |
| | | GLIGGTKFLAPGTPARFSGSLLGGKAALTLSGVQPEDEAEYYC |
| | | VLWYSNRWVFGGGTKLTVL |
| 567 | scFab-BiTE | QVQLVQSGAEVKKPGASVKVSCKASGYTFTSYWMHWVRQA |
| | HLE | PGQGLEWIGYITPSTGYTEYNQKFKGRVTMTRDKSTSTVYME |
| | | LSSLTSEDTAVYYCARVHDYDRAMEYWGQGTTVTVSSASTK |
| | | GPSVFPLAPSSKSTSGGTAALGCLVKDYFPEPVTVSWNSGALT |
| | | SGVHTFPAVLQSSGLYSLSSVVTVPSSSLGTQTYICNVNHKPS |
| | | NTKVDKKVEPKSCGGGGSGGGGSGGGGSGGGGSGGGGSGG |
| | | GGSGGGGSGGGGSDIQMTQSPSSLSASVGDRVTITCKASQDIN |
| | | KYIAWYQQKPGKGPKLLIYYTSTLQPGVPSRFSGSGSGTDFTF |
| | | TISSLQPEDIATYYCLQYASYPFTFGQGTRLEIKRTVAAPSVFIF |
| | | PPSDEQLKSGTASVVCLLNNFYPREAKVQWKVDNALQSGNS |
| | | QESVTEQDSKDSTYSLSSTLTLSKADYEKHKVYACEVTHQGL |
| | | SSPVTKSFNRGECSGGGGSEVQLVESGGGLVQPGGSLKLSCA |
| | | ASGFTFNKYAMNWVRQAPGKGLEWVARIRSKYNNYATYYA |
| | | DSVKDRFTISRDDSKNTAYLQMNNLKTEDTAVYYCVRHGNF |
| | | GNSYISYWAYWGQGTLVTVSSGGGGSGGGGSGGGGSQTVVT |
| | | QEPSLTVSPGGTVTLTCGSSTGAVTSGNYPNWVQQKPGQAPR |
| | | GLIGGTKFLAPGTPARFSGSLLGGKAALTLSGVQPEDEAEYYC |
| | | VLWYSNRWVFGGGTKLTVLGGGGDKTHTCPPCPAPELLGGP |
| | | SVFLFPPKPKDTLMISRTPEVTCVVVDVSHEDPEVKFNWYVD |
| | | GVEVHNAKTKPCEEQYGSTYRCVSVLTVLHQDWLNGKEYKC |
| | | KVSNKALPAPIEKTISKAKGQPREPQVYTLPPSREEMTKNQVS |
| | | LTCLVKGFYPSDIAVEWESNGQPENNYKTTPPVLDSDGSFFLY |
| | | SKLTVDKSRWQQGNVFSCSVMHEALHNHYTQKSLSLSPGKG |
| | | GGGSGGGGSGGGGSGGGGSGGGGSGGGGSDKTHTCPPCPAP |
| | | ELLGGPSVFLFPPKPKDTLMISRTPEVTCVVVDVSHEDPEVKF |
| | | NWYVDGVEVHNAKTKPCEEQYGSTYRCVSVLTVLHQDWLN |
| | | GKEYKCKVSNKALPAPIEKTISKAKGQPREPQVYTLPPSREEM |
| | | TKNQVSLTCLVKGFYPSDIAVEWESNGQPENNYKTTPPVLDS |
| | | DGSFFLYSKLTVDKSRWQQGNVFSCSVMHEALHNHYTQKSL |
| | | SLSPGK |

CD20 29-F5 scFab × I2C × scFc

| | | |
|---|---|---|
| 568 | VH-CH1 | QVQLQQWGAGLLKPSETLSLTCAVYGGSFSGYYWSWIRQPP |
| | | GKGLEWIGEINHRGSTNYNPSLKSRVTISGDTSKNQFSLKLSSV |
| | | NAADTAVYYCARGYSSSWYTGYVFDYWGQGTLVTVSSAST |
| | | KGPSVFPLAPSSKSTSGGTAALGCLVKDYFPEPVTVSWNSGAL |
| | | TSGVHTFPAVLQSSGLYSLSSVVTVPSSSLGTQTYICNVNHKPS |
| | | NTKVDKKVEPKSC |
| 569 | VL-CL | QSALTQPASVSGSPGQSITISCTGTSSDVFGYDYVSWYQQHPG |
| | | KAPKLMIYDVSNRPSGVSNRFSGSKSGNAASLTISGLQAEDEA |
| | | DYYCSSYKSSSTVVFGGGTKLTVLGQPKAAPSVTLFPPSSEEL |
| | | QANKATLVCLISDFYPGAVTVAWKADSSPVKAGVETTTPSKQ |
| | | SNNKYAASSYLSLTPEQWKSHRSYSCQVTHEGSTVEKTVAPT |
| | | ECS |
| 570 | scFab | QVQLQQWGAGLLKPSETLSLTCAVYGGSFSGYYWSWIRQPP |
| | | GKGLEWIGEINHRGSTNYNPSLKSRVTISGDTSKNQFSLKLSSV |
| | | NAADTAVYYCARGYSSSWYTGYVFDYWGQGTLVTVSSAST |
| | | KGPSVFPLAPSSKSTSGGTAALGCLVKDYFPEPVTVSWNSGAL |
| | | TSGVHTFPAVLQSSGLYSLSSVVTVPSSSLGTQTYICNVNHKPS |
| | | NTKVDKKVEPKSCGGGGSGGGGSGGGGSGGGGSGGGGSGG |
| | | GGSGGGGSGGGGSQSALTQPASVSGSPGQSITISCTGTSSDVFG |
| | | YDYVSWYQQHPGKAPKLMIYDVSNRPSGVSNRFSGSKSGNA |
| | | ASLTISGLQAEDEADYYCSSYKSSSTVVFGGGTKLTVLGQPKA |
| | | APSVTLFPPSSEELQANKATLVCLISDFYPGAVTVAWKADSSP |
| | | VKAGVETTTPSKQSNNKYAASSYLSLTPEQWKSHRSYSCQVT |
| | | HEGSTVEKTVAPTECS |
| 571 | scFab- | QVQLQQWGAGLLKPSETLSLTCAVYGGSFSGYYWSWIRQPP |
| | BISPECIFIC | GKGLEWIGEINHRGSTNYNPSLKSRVTISGDTSKNQFSLKLSSV |
| | MOL. | NAADTAVYYCARGYSSSWYTGYVFDYWGQGTLVTVSSAST |
| | | KGPSVFPLAPSSKSTSGGTAALGCLVKDYFPEPVTVSWNSGAL |
| | | TSGVHTFPAVLQSSGLYSLSSVVTVPSSSLGTQTYICNVNHKPS |
| | | NTKVDKKVEPKSCGGGGSGGGGSGGGGSGGGGSGGGGSGG |
| | | GGSGGGGSGGGGSQSALTQPASVSGSPGQSITISCTGTSSDVFG |
| | | YDYVSWYQQHPGKAPKLMIYDVSNRPSGVSNRFSGSKSGNA |
| | | ASLTISGLQAEDEADYYCSSYKSSSTVVFGGGTKLTVLGQPKA |
| | | APSVTLFPPSSEELQANKATLVCLISDFYPGAVTVAWKADSSP |
| | | VKAGVETTTPSKQSNNKYAASSYLSLTPEQWKSHRSYSCQVT |
| | | HEGSTVEKTVAPTECSSGGGGSEVQLVESGGGLVQPGGSLKL |
| | | SCAASGFTFNKYAMNWVRQAPGKGLEWVARIRSKYNNYAT |
| | | YYADSVKDRFTISRDDSKNTAYLQMNNLKTEDTAVYYCVRH |
| | | GNFGNSYISYWAYWGQGTLVTVSSGGGGSGGGGSGGGGSQT |
| | | VVTQEPSLTVSPGGTVTLTCGSSTGAVTSGNYPNWVQQKPGQ |
| | | APRGLIGGTKFLAPGTPARFSGSLLGGKAALTLSGVQPEDEAE |
| | | YYCVLWYSNRWVFGGGTKLTVL |
| 572 | scFab-BiTE | QVQLQQWGAGLLKPSETLSLTCAVYGGSFSGYYWSWIRQPP |
| | HLE | GKGLEWIGEINHRGSTNYNPSLKSRVTISGDTSKNQFSLKLSSV |
| | | NAADTAVYYCARGYSSSWYTGYVFDYWGQGTLVTVSSAST |
| | | KGPSVFPLAPSSKSTSGGTAALGCLVKDYFPEPVTVSWNSGAL |
| | | TSGVHTFPAVLQSSGLYSLSSVVTVPSSSLGTQTYICNVNHKPS |
| | | NTKVDKKVEPKSCGGGGSGGGGSGGGGSGGGGSGGGGSGG |
| | | GGSGGGGSGGGGSQSALTQPASVSGSPGQSITISCTGTSSDVFG |
| | | YDYVSWYQQHPGKAPKLMIYDVSNRPSGVSNRFSGSKSGNA |
| | | ASLTISGLQAEDEADYYCSSYKSSSTVVFGGGTKLTVLGQPKA |
| | | APSVTLFPPSSEELQANKATLVCLISDFYPGAVTVAWKADSSP |
| | | VKAGVETTTPSKQSNNKYAASSYLSLTPEQWKSHRSYSCQVT |
| | | HEGSTVEKTVAPTECSSGGGGSEVQLVESGGGLVQPGGSLKL |
| | | SCAASGFTFNKYAMNWVRQAPGKGLEWVARIRSKYNNYAT |
| | | YYADSVKDRFTISRDDSKNTAYLQMNNLKTEDTAVYYCVRH |
| | | GNFGNSYISYWAYWGQGTLVTVSSGGGGSGGGGSGGGGSQT |
| | | VVTQEPSLTVSPGGTVTLTCGSSTGAVTSGNYPNWVQQKPGQ |
| | | APRGLIGGTKFLAPGTPARFSGSLLGGKAALTLSGVQPEDEAE |
| | | YYCVLWYSNRWVFGGGTKLTVLGGGGDKTHTCPPCPAPELL |
| | | GGPSVFLFPPKPKDTLMISRTPEVTCVVVDVSHEDPEVKFNWY |
| | | VDGVEVHNAKTKPCEEQYGSTYRCVSVLTVLHQDWLNGKEY |
| | | KCKVSNKALPAPIEKTISKAKGQPREPQVYTLPPSREEMTKNQ |
| | | VSLTCLVKGFYPSDIAVEWESNGQPENNYKTTPPVLDSDGSFF |
| | | LYSKLTVDKSRWQQGNVFSCSVMHEALHNHYTQKSLSLSPG |
| | | KGGGGSGGGGSGGGGSGGGGSGGGGSGGGGSDKTHTCPPCP |
| | | APELLGGPSVFLFPPKPKDTLMISRTPEVTCVVVDVSHEDPEV |
| | | KFNWYVDGVEVHNAKTKPCEEQYGSTYRCVSVLTVLHQDW |
| | | LNGKEYKCKVSNKALPAPIEKTISKAKGQPREPQVYTLPPSRE |
| | | EMTKNQVSLTCLVKGFYPSDIAVEWESNGQPENNYKTTPPVL |
| | | DSDGSFFLYSKLTVDKSRWQQGNVFSCSVMHEALHNHYTQK |
| | | SLSLSPGK |

CD22 11-C3 scFab × I2C × scFc

| | | |
|---|---|---|
| 573 | VH-CH1 | QVQLQESGPGLVKPSETLSLTCTVSGGSISSFYWSWIRQPPGK |
| | | GLEWIGRISSSGDVDYNPSLKSRVTISVDTSKNQFSLKLSSVTA |
| | | ADTAVYYCAREGGFYYWGQGTLVTVSSASTKGPSVFPLAPSS |
| | | KSTSGGTAALGCLVKDYFPEPVTVSWNSGALTSGVHTFPAVL |
| | | QSSGLYSLSSVVTVPSSSLGTQTYICNVNHKPSNTKVDKKVEP |
| | | KSC |
| 574 | VL-CL | EIVLTQSPGTLSLSPGERATLSCRASQSVSSSYLAWYQQKPGQ |
| | | APRLLIYGASSRATGIPDRFSGSGSGTDFTLTISRLEPEDFAVYY |
| | | CQQYGSSPITFGQGTKLEIKRTVAAPSVFIFPPSDEQLKSGTAS |
| | | VVCLLNNFYPREAKVQWKVDNALQSGNSQESVTEQDSKDST |
| | | YSLSSTLTLSKADYEKHKVYACEVTHQGLSSPVTKSFNRGEC |
| 575 | scFab | QVQLQESGPGLVKPSETLSLTCTVSGGSISSFYWSWIRQPPGK |
| | | GLEWIGRISSSGDVDYNPSLKSRVTISVDTSKNQFSLKLSSVTA |
| | | ADTAVYYCAREGGFYYWGQGTLVTVSSASTKGPSVFPLAPSS |
| | | KSTSGGTAALGCLVKDYFPEPVTVSWNSGALTSGVHTFPAVL |
| | | QSSGLYSLSSVVTVPSSSLGTQTYICNVNHKPSNTKVDKKVEP |
| | | KSCGGGGSGGGGSGGGGSGGGGSGGGGSGGGGSGGGGSGG |
| | | GGSEIVLTQSPGTLSLSPGERATLSCRASQSVSSSYLAWYQQK |
| | | PGQAPRLLIYGASSRATGIPDRFSGSGSGTDFTLTISRLEPEDFA |
| | | VYYCQQYGSSPITFGQGTKLEIKRTVAAPSVFIFPPSDEQLKSG |
| | | TASVVCLLNNFYPREAKVQWKVDNALQSGNSQESVTEQDSK |
| | | DSTYSLSSTLTLSKADYEKHKVYACEVTHQGLSSPVTKSFNRG |
| | | EC |
| 576 | scFab- | QVQLQESGPGLVKPSETLSLTCTVSGGSISSFYWSWIRQPPGK |
| | BISPECIFIC | GLEWIGRISSSGDVDYNPSLKSRVTISVDTSKNQFSLKLSSVTA |
| | MOL. | ADTAVYYCAREGGFYYWGQGTLVTVSSASTKGPSVFPLAPSS |
| | | KSTSGGTAALGCLVKDYFPEPVTVSWNSGALTSGVHTFPAVL |
| | | QSSGLYSLSSVVTVPSSSLGTQTYICNVNHKPSNTKVDKKVEP |
| | | KSCGGGGSGGGGSGGGGSGGGGSGGGGSGGGGSGGGGSGG |
| | | GGSEIVLTQSPGTLSLSPGERATLSCRASQSVSSSYLAWYQQK |
| | | PGQAPRLLIYGASSRATGIPDRFSGSGSGTDFTLTISRLEPEDFA |
| | | VYYCQQYGSSPITFGQGTKLEIKRTVAAPSVFIFPPSDEQLKSG |
| | | TASVVCLLNNFYPREAKVQWKVDNALQSGNSQESVTEQDSK |
| | | DSTYSLSSTLTLSKADYEKHKVYACEVTHQGLSSPVTKSFNRG |
| | | ECSGGGGSEVQLVESGGGLVQPGGSLKLSCAASGFTFNKYAM |
| | | NWVRQAPGKGLEWVARIRSKYNNYATYYADSVKDRFTISRD |
| | | DSKNTAYLQMNNLKTEDTAVYYCVRHGNFGNSYISYWAYW |
| | | GQGTLVTVSSGGGGSGGGGSGGGGSQTVVTQEPSLTVSPGGT |
| | | VTLTCGSSTGAVTSGNYPNWVQQKPGQAPRGLIGGTKFLAPG |
| | | TPARFSGSLLGGKAALTLSGVQPEDEAEYYCVLWYSNRWVF |
| | | GGGTKLTVL |
| 577 | scFab-BiTE | QVQLQESGPGLVKPSETLSLTCTVSGGSISSFYWSWIRQPPGK |
| | HLE | GLEWIGRISSSGDVDYNPSLKSRVTISVDTSKNQFSLKLSSVTA |
| | | ADTAVYYCAREGGFYYWGQGTLVTVSSASTKGPSVFPLAPSS |
| | | KSTSGGTAALGCLVKDYFPEPVTVSWNSGALTSGVHTFPAVL |
| | | QSSGLYSLSSVVTVPSSSLGTQTYICNVNHKPSNTKVDKKVEP |
| | | KSCGGGGSGGGGSGGGGSGGGGSGGGGSGGGGSGGGGSGG |
| | | GGSEIVLTQSPGTLSLSPGERATLSCRASQSVSSSYLAWYQQK |
| | | PGQAPRLLIYGASSRATGIPDRFSGSGSGTDFTLTISRLEPEDFA |
| | | VYYCQQYGSSPITFGQGTKLEIKRTVAAPSVFIFPPSDEQLKSG |
| | | TASVVCLLNNFYPREAKVQWKVDNALQSGNSQESVTEQDSK |
| | | DSTYSLSSTLTLSKADYEKHKVYACEVTHQGLSSPVTKSFNRG |
| | | ECSGGGGSEVQLVESGGGLVQPGGSLKLSCAASGFTFNKYAM |
| | | NWVRQAPGKGLEWVARIRSKYNNYATYYADSVKDRFTISRD |
| | | DSKNTAYLQMNNLKTEDTAVYYCVRHGNFGNSYISYWAYW |
| | | GQGTLVTVSSGGGGSGGGGSGGGGSQTVVTQEPSLTVSPGGT |
| | | VTLTCGSSTGAVTSGNYPNWVQQKPGQAPRGLIGGTKFLAPG |
| | | TPARFSGSLLGGKAALTLSGVQPEDEAEYYCVLWYSNRWVF |
| | | GGGTKLTVLGGGGDKTHTCPPCPAPELLGGPSVFLFPPKPKDT |
| | | LMISRTPEVTCVVVDVSHEDPEVKFNWYVDGVEVHNAKTKP |
| | | CEEQYGSTYRCVSVLTVLHQDWLNGKEYKCKVSNKALPAPIE |
| | | KTISKAKGQPREPQVYTLPPSREEMTKNQVSLTCLVKGFYPSD |
| | | IAVEWESNGQPENNYKTTPPVLDSDGSFFLYSKLTVDKSRWQ |
| | | QGNVFSCSVMHEALHNHYTQKSLSLSPGKGGGGSGGGGSGG |
| | | GGSGGGGSGGGGSGGGGSDKTHTCPPCPAPELLGGPSVFLFPP |
| | | KPKDTLMISRTPEVTCVVVDVSHEDPEVKFNWYVDGVEVHN |
| | | AKTKPCEEQYGSTYRCVSVLTVLHQDWLNGKEYKCKVSNKA |
| | | LPAPIEKTISKAKGQPREPQVYTLPPSREEMTKNQVSLTCLVK |
| | | GFYPSDIAVEWESNGQPENNYKTTPPVLDSDGSFFLYSKLTVD |
| | | KSRWQQGNVFSCSVMHEALHNHYTQKSLSLSPGK |
| 578 | CD20 99-E5 | QVQLVQSGAEVKKPGASVKVSCKASGYTFTSYWMHWVRQA |
| | CC scFv × | PGQCLEWIGYITPSTGYTEYNQKFKGRVTMTRDKSTSTVYME |
| | CD22 28-B7 | LSSLTSEDTAVYYCARVHDYDRAMEYWGQGTTVTVSSGGGG |
| | N655 CC | SGGGGSGGGGSDIQMTQSPSSLSASVGDRVTITCKASQDINKY |
| | scFv | IAWYQQKPGKGPKLLIYYTSTLQPGVPSRFSGSGSGTDFTFTIS |
| | | SLQPEDIATYYCLQYASYPFTFGCGTRLEIKSGGGGSQVQLVQ |
| | | SGAEVKKPGASVKVSCKASGYTFTSYGISWVRQAPGQCLEW |
| | | MGWISAYSGNAIYAQKLQGRVTMTRDTSTSTAYMELRSLRSD |
| | | DTAVYYCARDPDYYGSGSYSDYWGQGTLVTVSSGGGGSGG |
| | | GGSGGGGSEIVLTQSPATLSVSPGERATLSCRASQSVSSNLAW |
| | | YQQKPGQAPRLLIYGASSRATGIPARFSGSGSGTEFTLTISSLQS |
| | | EDFAVYYCQQYHSWPLLTFGCGTKVEIK |
| 579 | CD20 99-E5 | QVQLVQSGAEVKKPGASVKVSCKASGYTFTSYWMHWVRQA |
| | CC scFv × | PGQCLEWIGYITPSTGYTEYNQKFKGRVTMTRDKSTSTVYME |
| | CD22 28-B7 | LSSLTSEDTAVYYCARVHDYDRAMEYWGQGTTVTVSSGGGG |
| | N655 CC | SGGGGSGGGGSDIQMTQSPSSLSASVGDRVTITCKASQDINKY |
| | scFv × I2C | IAWYQQKPGKGPKLLIYYTSTLQPGVPSRFSGSGSGTDFTFTIS |
| | | SLQPEDIATYYCLQYASYPFTFGCGTRLEIKSGGGGSQVQLVQ |
| | | SGAEVKKPGASVKVSCKASGYTFTSYGISWVRQAPGQCLEW |
| | | MGWISAYSGNAIYAQKLQGRVTMTRDTSTSTAYMELRSLRSD |
| | | DTAVYYCARDPDYYGSGSYSDYWGQGTLVTVSSGGGGSGG |
| | | GGSGGGGSEIVLTQSPATLSVSPGERATLSCRASQSVSSNLAW |
| | | YQQKPGQAPRLLIYGASSRATGIPARFSGSGSGTEFTLTISSLQS |
| | | EDFAVYYCQQYHSWPLLTFGCGTKVEIKSGGGGSEVQLVESG |
| | | GGLVQPGGSLKLSCAASGFTFNKYAMNWVRQAPGKGLEWV |
| | | ARIRSKYNNYATYYADSVKDRFTISRDDSKNTAYLQMNNLKT |
| | | EDTAVYYCVRHGNFGNSYISYWAYWGQGTLVTVSSGGGGSG |
| | | GGGSGGGGSQTVVTQEPSLTVSPGGTVTLTCGSSTGAVTSGN |
| | | YPNWVQQKPGQAPRGLIGGTKFLAPGTPARFSGSLLGGKAAL |
| | | TLSGVQPEDEAEYYCVLWYSNRWVFGGGTKLTVL |
| 580 | CD20 99-E5 | QVQLVQSGAEVKKPGASVKVSCKASGYTFTSYWMHWVRQA |
| | CC scFv × | PGQCLEWIGYITPSTGYTEYNQKFKGRVTMTRDKSTSTVYME |
| | CD22 28-B7 | LSSLTSEDTAVYYCARVHDYDRAMEYWGQGTTVTVSSGGGG |
| | N655 CC | SGGGGSGGGGSDIQMTQSPSSLSASVGDRVTITCKASQDINKY |
| | scFv × I2C × | IAWYQQKPGKGPKLLIYYTSTLQPGVPSRFSGSGSGTDFTFTIS |
| | scFc | SLQPEDIATYYCLQYASYPFTFGCGTRLEIKSGGGGSQVQLVQ |
| | | SGAEVKKPGASVKVSCKASGYTFTSYGISWVRQAPGQCLEW |
| | | MGWISAYSGNAIYAQKLQGRVTMTRDTSTSTAYMELRSLRSD |
| | | DTAVYYCARDPDYYGSGSYSDYWGQGTLVTVSSGGGGSGG |
| | | GGSGGGGSEIVLTQSPATLSVSPGERATLSCRASQSVSSNLAW |
| | | YQQKPGQAPRLLIYGASSRATGIPARFSGSGSGTEFTLTISSLQS |
| | | EDFAVYYCQQYHSWPLLTFGCGTKVEIKSGGGGSEVQLVESG |
| | | GGLVQPGGSLKLSCAASGFTFNKYAMNWVRQAPGKGLEWV |
| | | ARIRSKYNNYATYYADSVKDRFTISRDDSKNTAYLQMNNLKT |
| | | EDTAVYYCVRHGNFGNSYISYWAYWGQGTLVTVSSGGGGSG |
| | | GGGSGGGGSQTVVTQEPSLTVSPGGTVTLTCGSSTGAVTSGN |
| | | YPNWVQQKPGQAPRGLIGGTKFLAPGTPARFSGSLLGGKAAL |
| | | TLSGVQPEDEAEYYCVLWYSNRWVFGGGTKLTVLGGGGDKT |
| | | HTCPPCPAPELLGGPSVFLFPPKPKDTLMISRTPEVTCVVVDVS |
| | | HEDPEVKFNWYVDGVEVHNAKTKPCEEQYGSTYRCVSVLTV |
| | | LHQDWLNGKEYKCKVSNKALPAPIEKTISKAKGQPREPQVYT |
| | | LPPSREEMTKNQVSLTCLVKGFYPSDIAVEWESNGQPENNYK |
| | | TTPPVLDSDGSFFLYSKLTVDKSRWQQGNVFSCSVMHEALHN |
| | | HYTQKSLSLSPGKGGGGSGGGGSGGGGSGGGGSGGGGSGGG |
| | | GSDKTHTCPPCPAPELLGGPSVFLFPPKPKDTLMISRTPEVTCV |
| | | VVDVSHEDPEVKFNWYVDGVEVHNAKTKPCEEQYGSTYRCV |
| | | SVLTVLHQDWLNGKEYKCKVSNKALPAPIEKTISKAKGQPRE |
| | | PQVYTLPPSREEMTKNQVSLTCLVKGFYPSDIAVEWESNGQPE |
| | | NNYKTTPPVLDSDGSFFLYSKLTVDKSRWQQGNVFSCSVMHE |
| | | ALHNHYTQKSLSLSPGK |
| 581 | CD22 11-C3 | QVQLQESGPGLVKPSETLSLTCTVSGGSISSFYWSWIRQPPGK |
| | CC scFv × | CLEWIGRISSSGDVDYNPSLKSRVTISVDTSKNQFSLKLSSVTA |
| | CD20 29-F5 | ADTAVYYCAREGGFYYWGQGTLVTVSSGGGGSGGGGSGGG |
| | CC scFv | GSEIVLTQSPGTLSLSPGERATLSCRASQSVSSSYLAWYQQKP |
| | | GQAPRLLIYGASSRATGIPDRFSGSGSGTDFTLTISRLEPEDFAV |
| | | YYCQQYGSSPITFGCGTKLEIKSGGGGSQVQLQQWGAGLLKP |
| | | SETLSLTCAVYGGSFSGYYWSWIRQPPGKCLEWIGEINHRGST |
| | | NYNPSLKSRVTISGDTSKNQFSLKLSSVNAADTAVYYCARGY |
| | | SSSWYTGYVFDYWGQGTLVTVSSGGGGSGGGGSGGGGSQSA |
| | | LTQPASVSGSPGQSITISCTGTSSDVFGYDYVSWYQQHPGKAP |
| | | KLMIYDVSNRPSGVSNRFSGSKSGNAASLTISGLQAEDEADYY |
| | | CSSYKSSSTVVFGCGTKLTVL |
| 582 | CD22 11-C3 | QVQLQESGPGLVKPSETLSLTCTVSGGSISSFYWSWIRQPPGK |
| | CC scFv × | CLEWIGRISSSGDVDYNPSLKSRVTISVDTSKNQFSLKLSSVTA |
| | CD20 29-F5 | ADTAVYYCAREGGFYYWGQGTLVTVSSGGGGSGGGGSGGG |
| | CC scFv × | GSEIVLTQSPGTLSLSPGERATLSCRASQSVSSSYLAWYQQKP |
| | 12C | GQAPRLLIYGASSRATGIPDRFSGSGSGTDFTLTISRLEPEDFAV |
| | | YYCQQYGSSPITFGCGTKLEIKSGGGGSQVQLQQWGAGLLKP |
| | | SETLSLTCAVYGGSFSGYYWSWIRQPPGKCLEWIGEINHRGST |
| | | NYNPSLKSRVTISGDTSKNQFSLKLSSVNAADTAVYYCARGY |
| | | SSSWYTGYVFDYWGQGTLVTVSSGGGGSGGGGSGGGGSQSA |
| | | LTQPASVSGSPGQSITISCTGTSSDVFGYDYVSWYQQHPGKAP |
| | | KLMIYDVSNRPSGVSNRFSGSKSGNAASLTISGLQAEDEADYY |
| | | CSSYKSSSTVVFGCGTKLTVLSGGGGSEVQLVESGGGLVQPG |
| | | GSLKLSCAASGFTFNKYAMNWVRQAPGKGLEWVARIRSKYN |
| | | NYATYYADSVKDRFTISRDDSKNTAYLQMNNLKTEDTAVYY |
| | | CVRHGNFGNSYISYWAYWGQGTLVTVSSGGGGSGGGGSGGG |
| | | GSQTVVTQEPSLTVSPGGTVTLTCGSSTGAVTSGNYPNWVQQ |
| | | KPGQAPRGLIGGTKFLAPGTPARFSGSLLGGKAALTLSGVQPE |
| | | DEAEYYCVLWYSNRWVFGGGTKLTVL |
| 583 | CD22 11-C3 | QVQLQESGPGLVKPSETLSLTCTVSGGSISSFYWSWIRQPPGK |
| | CC scFv × | CLEWIGRISSSGDVDYNPSLKSRVTISVDTSKNQFSLKLSSVTA |
| | CD20 29-F5 | ADTAVYYCAREGGFYYWGQGTLVTVSSGGGGSGGGGSGGG |
| | CC scFv × | GSEIVLTQSPGTLSLSPGERATLSCRASQSVSSSYLAWYQQKP |
| | I2C × scFc | GQAPRLLIYGASSRATGIPDRFSGSGSGTDFTLTISRLEPEDFAV |
| | | YYCQQYGSSPITFGCGTKLEIKSGGGGSQVQLQQWGAGLLKP |
| | | SETLSLTCAVYGGSFSGYYWSWIRQPPGKCLEWIGEINHRGST |
| | | NYNPSLKSRVTISGDTSKNQFSLKLSSVNAADTAVYYCARGY |
| | | SSSWYTGYVFDYWGQGTLVTVSSGGGGSGGGGSGGGGSQSA |
| | | LTQPASVSGSPGQSITISCTGTSSDVFGYDYVSWYQQHPGKAP |
| | | KLMIYDVSNRPSGVSNRFSGSKSGNAASLTISGLQAEDEADYY |
| | | CSSYKSSSTVVFGCGTKLTVLSGGGGSEVQLVESGGGLVQPG |
| | | GSLKLSCAASGFTFNKYAMNWVRQAPGKGLEWVARIRSKYN |
| | | NYATYYADSVKDRFTISRDDSKNTAYLQMNNLKTEDTAVYY |
| | | CVRHGNFGNSYISYWAYWGQGTLVTVSSGGGGSGGGGSGGG |
| | | GSQTVVTQEPSLTVSPGGTVTLTCGSSTGAVTSGNYPNWVQQ |
| | | KPGQAPRGLIGGTKFLAPGTPARFSGSLLGGKAALTLSGVQPE |
| | | DEAEYYCVLWYSNRWVFGGGTKLTVLGGGGDKTHTCPPCPA |
| | | PELLGGPSVFLFPPKPKDTLMISRTPEVTCVVVDVSHEDPEVKF |
| | | NWYVDGVEVHNAKTKPCEEQYGSTYRCVSVLTVLHQDWLN |
| | | GKEYKCKVSNKALPAPIEKTISKAKGQPREPQVYTLPPSREEM |
| | | TKNQVSLTCLVKGFYPSDIAVEWESNGQPENNYKTTPPVLDS |
| | | DGSFFLYSKLTVDKSRWQQGNVFSCSVMHEALHNHYTQKSL |
| | | SLSPGKGGGGSGGGGSGGGGSGGGGSGGGGSGGGGSDKTHT |
| | | CPPCPAPELLGGPSVFLFPPKPKDTLMISRTPEVTCVVVDVSHE |
| | | DPEVKFNWYVDGVEVHNAKTKPCEEQYGSTYRCVSVLTVLH |
| | | QDWLNGKEYKCKVSNKALPAPIEKTISKAKGQPREPQVYTLP |
| | | PSREEMTKNQVSLTCLVKGFYPSDIAVEWESNGQPENNYKTT |
| | | PPVLDSDGSFFLYSKLTVDKSRWQQGNVFSCSVMHEALHNH |
| | | YTQKSLSLSPGK |
| 584 | CD20 99-E5 | QVQLVQSGAEVKKPGASVKVSCKASGYTFTSYWMHWVRQA |
| | scFab × | PGQGLEWIGYITPSTGYTEYNQKFKGRVTMTRDKSTSTVYME |
| | CD22 28-B7 | LSSLTSEDTAVYYCARVHDYDRAMEYWGQGTTVTVSSASTK |
| | N655 CC | GPSVFPLAPSSKSTSGGTAALGCLVKDYFPEPVTVSWNSGALT |
| | scFv | SGVHTFPAVLQSSGLYSLSSVVTVPSSSLGTQTYICNVNHKPS |
| | | NTKVDKKVEPKSCGGGGSGGGGSGGGGSGGGGSGGGGSGG |
| | | GGSGGGGSGGGGSDIQMTQSPSSLSASVGDRVTITCKASQDIN |
| | | KYIAWYQQKPGKGPKLLIYYTSTLQPGVPSRFSGSGSGTDFTF |
| | | TISSLQPEDIATYYCLQYASYPFTFGQGTRLEIKRTVAAPSVFIF |
| | | PPSDEQLKSGTASVVCLLNNFYPREAKVQWKVDNALQSGNS |
| | | QESVTEQDSKDSTYSLSSTLTLSKADYEKHKVYACEVTHQGL |
| | | SSPVTKSFNRGECSGGGGSQVQLVQSGAEVKKPGASVKVSCK |
| | | ASGYTFTSYGISWVRQAPGQCLEWMGWISAYSGNAIYAQKL |
| | | QGRVTMTRDTSTSTAYMELRSLRSDDTAVYYCARDPDYYGS |
| | | GSYSDYWGQGTLVTVSSGGGGSGGGGSGGGGSEIVLTQSPAT |
| | | LSVSPGERATLSCRASQSVSSNLAWYQQKPGQAPRLLIYGASS |
| | | RATGIPARFSGSGSGTEFTLTISSLQSEDFAVYYCQQYHSWPLL |
| | | TFGCGTKVEIK |
| 585 | CD20 99-E5 | QVQLVQSGAEVKKPGASVKVSCKASGYTFTSYWMHWVRQA |
| | scFab × | PGQGLEWIGYITPSTGYTEYNQKFKGRVTMTRDKSTSTVYME |
| | CD22 28-B7 | LSSLTSEDTAVYYCARVHDYDRAMEYWGQGTTVTVSSASTK |
| | N655 CC | GPSVFPLAPSSKSTSGGTAALGCLVKDYFPEPVTVSWNSGALT |
| | scFv × I2C | SGVHTFPAVLQSSGLYSLSSVVTVPSSSLGTQTYICNVNHKPS |
| | | NTKVDKKVEPKSCGGGGSGGGGSGGGGSGGGGSGGGGSGG |
| | | GGSGGGGSGGGGSDIQMTQSPSSLSASVGDRVTITCKASQDIN |
| | | KYIAWYQQKPGKGPKLLIYYTSTLQPGVPSRFSGSGSGTDFTF |
| | | TISSLQPEDIATYYCLQYASYPFTFGQGTRLEIKRTVAAPSVFIF |
| | | PPSDEQLKSGTASVVCLLNNFYPREAKVQWKVDNALQSGNS |
| | | QESVTEQDSKDSTYSLSSTLTLSKADYEKHKVYACEVTHQGL |
| | | SSPVTKSFNRGECSGGGGSQVQLVQSGAEVKKPGASVKVSCK |
| | | ASGYTFTSYGISWVRQAPGQCLEWMGWISAYSGNAIYAQKL |
| | | QGRVTMTRDTSTSTAYMELRSLRSDDTAVYYCARDPDYYGS |
| | | GSYSDYWGQGTLVTVSSGGGGSGGGGSGGGGSEIVLTQSPAT |
| | | LSVSPGERATLSCRASQSVSSNLAWYQQKPGQAPRLLIYGASS |
| | | RATGIPARFSGSGSGTEFTLTISSLQSEDFAVYYCQQYHSWPLL |
| | | TFGCGTKVEIKSGGGGSEVQLVESGGGLVQPGGSLKLSCAAS |
| | | GFTFNKYAMNWVRQAPGKGLEWVARIRSKYNNYATYYADS |
| | | VKDRFTISRDDSKNTAYLQMNNLKTEDTAVYYCVRHGNFGN |
| | | SYISYWAYWGQGTLVTVSSGGGGSGGGGSGGGGSQTVVTQE |
| | | PSLTVSPGGTVTLTCGSSTGAVTSGNYPNWVQQKPGQAPRGL |
| | | IGGTKFLAPGTPARFSGSLLGGKAALTLSGVQPEDEAEYYCVL |
| | | WYSNRWVFGGGTKLTVL |
| 586 | CD20 99-E5 | QVQLVQSGAEVKKPGASVKVSCKASGYTFTSYWMHWVRQA |
| | scFab × | PGQGLEWIGYITPSTGYTEYNQKFKGRVTMTRDKSTSTVYME |
| | CD22 28-B7 | LSSLTSEDTAVYYCARVHDYDRAMEYWGQGTTVTVSSASTK |
| | N655 CC | GPSVFPLAPSSKSTSGGTAALGCLVKDYFPEPVTVSWNSGALT |
| | scFv × I2C × | SGVHTFPAVLQSSGLYSLSSVVTVPSSSLGTQTYICNVNHKPS |
| | scFc | NTKVDKKVEPKSCGGGGSGGGGSGGGGSGGGGSGGGGSGG |
| | | GGSGGGGSGGGGSDIQMTQSPSSLSASVGDRVTITCKASQDIN |
| | | KYIAWYQQKPGKGPKLLIYYTSTLQPGVPSRFSGSGSGTDFTF |
| | | TISSLQPEDIATYYCLQYASYPFTFGQGTRLEIKRTVAAPSVFIF |
| | | PPSDEQLKSGTASVVCLLNNFYPREAKVQWKVDNALQSGNS |
| | | QESVTEQDSKDSTYSLSSTLTLSKADYEKHKVYACEVTHQGL |
| | | SSPVTKSFNRGECSGGGGSQVQLVQSGAEVKKPGASVKVSCK |
| | | ASGYTFTSYGISWVRQAPGQCLEWMGWISAYSGNAIYAQKL |
| | | QGRVTMTRDTSTSTAYMELRSLRSDDTAVYYCARDPDYYGS |
| | | GSYSDYWGQGTLVTVSSGGGGSGGGGSGGGGSEIVLTQSPAT |
| | | LSVSPGERATLSCRASQSVSSNLAWYQQKPGQAPRLLIYGASS |
| | | RATGIPARFSGSGSGTEFTLTISSLQSEDFAVYYCQQYHSWPLL |
| | | TFGCGTKVEIKSGGGGSEVQLVESGGGLVQPGGSLKLSCAAS |
| | | GFTFNKYAMNWVRQAPGKGLEWVARIRSKYNNYATYYADS |
| | | VKDRFTISRDDSKNTAYLQMNNLKTEDTAVYYCVRHGNFGN |
| | | SYISYWAYWGQGTLVTVSSGGGGSGGGGSGGGGSQTVVTQE |
| | | PSLTVSPGGTVTLTCGSSTGAVTSGNYPNWVQQKPGQAPRGL |
| | | IGGTKFLAPGTPARFSGSLLGGKAALTLSGVQPEDEAEYYCVL |
| | | WYSNRWVFGGGTKLTVLGGGGDKTHTCPPCPAPELLGGPSV |
| | | FLFPPKPKDTLMISRTPEVTCVVVDVSHEDPEVKFNWYVDGV |
| | | EVHNAKTKPCEEQYGSTYRCVSVLTVLHQDWLNGKEYKCKV |
| | | SNKALPAPIEKTISKAKGQPREPQVYTLPPSREEMTKNQVSLT |
| | | CLVKGFYPSDIAVEWESNGQPENNYKTTPPVLDSDGSFFLYSK |
| | | LTVDKSRWQQGNVFSCSVMHEALHNHYTQKSLSLSPGKGGG |
| | | GSGGGGSGGGGSGGGGSGGGGSGGGGSDKTHTCPPCPAPELL |
| | | GGPSVFLFPPKPKDTLMISRTPEVTCVVVDVSHEDPEVKFNWY |
| | | VDGVEVHNAKTKPCEEQYGSTYRCVSVLTVLHQDWLNGKEY |
| | | KCKVSNKALPAPIEKTISKAKGQPREPQVYTLPPSREEMTKNQ |
| | | VSLTCLVKGFYPSDIAVEWESNGQPENNYKTTPPVLDSDGSFF |
| | | LYSKLTVDKSRWQQGNVFSCSVMHEALHNHYTQKSLSLSPG |
| | | K |
| 587 | CD22 11-C3 | QVQLQESGPGLVKPSETLSLTCTVSGGSISSFYWSWIRQPPGK |
| | scFab × | GLEWIGRISSSGDVDYNPSLKSRVTISVDTSKNQFSLKLSSVTA |
| | CD20 29-F5 | ADTAVYYCAREGGFYYWGQGTLVTVSSASTKGPSVFPLAPSS |
| | scFab | KSTSGGTAALGCLVKDYFPEPVTVSWNSGALTSGVHTFPAVL |
| | | QSSGLYSLSSVVTVPSSSLGTQTYICNVNHKPSNTKVDKKVEP |
| | | KSCGGGGSGGGGSGGGGSGGGGSGGGGSGGGGSGGGGSGG |
| | | GGSEIVLTQSPGTLSLSPGERATLSCRASQSVSSSYLAWYQQK |
| | | PGQAPRLLIYGASSRATGIPDRFSGSGSGTDFTLTISRLEPEDFA |
| | | VYYCQQYGSSPITFGQGTKLEIKRTVAAPSVFIFPPSDEQLKSG |
| | | TASVVCLLNNFYPREAKVQWKVDNALQSGNSQESVTEQDSK |
| | | DSTYSLSSTLTLSKADYEKHKVYACEVTHQGLSSPVTKSFNRG |
| | | ECSGGGGSQVQLQQWGAGLLKPSETLSLTCAVYGGSFSGYY |
| | | WSWIRQPPGKGLEWIGEINHRGSTNYNPSLKSRVTISGDTSKN |
| | | QFSLKLSSVNAADTAVYYCARGYSSSWYTGYVFDYWGQGTL |
| | | VTVSSASTKGPSVFPLAPSSKSTSGGTAALGCLVKDYFPEPVT |
| | | VSWNSGALTSGVHTFPAVLQSSGLYSLSSVVTVPSSSLGTQTY |
| | | ICNVNHKPSNTKVDKKVEPKSCGGGGSGGGGSGGGGSGGGG |
| | | SGGGGSGGGGSGGGGSGGGGSQSALTQPASVSGSPGQSITISC |
| | | TGTSSDVFGYDYVSWYQQHPGKAPKLMIYDVSNRPSGVSNRF |
| | | SGSKSGNAASLTISGLQAEDEADYYCSSYKSSSTVVFGGGTKL |
| | | TVLGQPKAAPSVTLFPPSSEELQANKATLVCLISDFYPGAVTV |
| | | AWKADSSPVKAGVETTTPSKQSNNKYAASSYLSLTPEQWKSH |
| | | RSYSCQVTHEGSTVEKTVAPTECS |
| 588 | CD22 11-C3 | QVQLQESGPGLVKPSETLSLTCTVSGGSISSFYWSWIRQPPGK |
| | scFab × | GLEWIGRISSSGDVDYNPSLKSRVTISVDTSKNQFSLKLSSVTA |
| | CD20 29-F5 | ADTAVYYCAREGGFYYWGQGTLVTVSSASTKGPSVFPLAPSS |
| | scFab × I2C | KSTSGGTAALGCLVKDYFPEPVTVSWNSGALTSGVHTFPAVL |
| | | QSSGLYSLSSVVTVPSSSLGTQTYICNVNHKPSNTKVDKKVEP |
| | | KSCGGGGSGGGGSGGGGSGGGGSGGGGSGGGGSGGGGSGG |
| | | GGSEIVLTQSPGTLSLSPGERATLSCRASQSVSSSYLAWYQQK |
| | | PGQAPRLLIYGASSRATGIPDRFSGSGSGTDFTLTISRLEPEDFA |
| | | VYYCQQYGSSPITFGQGTKLEIKRTVAAPSVFIFPPSDEQLKSG |
| | | TASVVCLLNNFYPREAKVQWKVDNALQSGNSQESVTEQDSK |
| | | DSTYSLSSTLTLSKADYEKHKVYACEVTHQGLSSPVTKSFNRG |
| | | ECSGGGGSQVQLQQWGAGLLKPSETLSLTCAVYGGSFSGYY |
| | | WSWIRQPPGKGLEWIGEINHRGSTNYNPSLKSRVTISGDTSKN |
| | | QFSLKLSSVNAADTAVYYCARGYSSSWYTGYVFDYWGQGTL |
| | | VTVSSASTKGPSVFPLAPSSKSTSGGTAALGCLVKDYFPEPVT |
| | | VSWNSGALTSGVHTFPAVLQSSGLYSLSSVVTVPSSSLGTQTY |
| | | ICNVNHKPSNTKVDKKVEPKSCGGGGSGGGGSGGGGSGGGG |
| | | SGGGGSGGGGSGGGGSGGGGSQSALTQPASVSGSPGQSITISC |
| | | TGTSSDVFGYDYVSWYQQHPGKAPKLMIYDVSNRPSGVSNRF |
| | | SGSKSGNAASLTISGLQAEDEADYYCSSYKSSSTVVFGGGTKL |
| | | TVLGQPKAAPSVTLFPPSSEELQANKATLVCLISDFYPGAVTV |
| | | AWKADSSPVKAGVETTTPSKQSNNKYAASSYLSLTPEQWKSH |
| | | RSYSCQVTHEGSTVEKTVAPTECSSGGGGSEVQLVESGGGLV |
| | | QPGGSLKLSCAASGFTFNKYAMNWVRQAPGKGLEWVARIRS |
| | | KYNNYATYYADSVKDRFTISRDDSKNTAYLQMNNLKTEDTA |
| | | VYYCVRHGNFGNSYISYWAYWGQGTLVTVSSGGGGSGGGGS |
| | | GGGGSQTVVTQEPSLTVSPGGTVTLTCGSSTGAVTSGNYPNW |
| | | VQQKPGQAPRGLIGGTKFLAPGTPARFSGSLLGGKAALTLSGV |
| | | QPEDEAEYYCVLWYSNRWVFGGGTKLTVL |
| 589 | CD22 11-C3 | QVQLQESGPGLVKPSETLSLTCTVSGGSISSFYWSWIRQPPGK |
| | scFab × | GLEWIGRISSSGDVDYNPSLKSRVTISVDTSKNQFSLKLSSVTA |
| | CD20 29-F5 | ADTAVYYCAREGGFYYWGQGTLVTVSSASTKGPSVFPLAPSS |
| | scFab × I2C | KSTSGGTAALGCLVKDYFPEPVTVSWNSGALTSGVHTFPAVL |
| | × scFc | QSSGLYSLSSVVTVPSSSLGTQTYICNVNHKPSNTKVDKKVEP |
| | | KSCGGGGSGGGGSGGGGSGGGGSGGGGSGGGGSGGGGSGG |
| | | GGSEIVLTQSPGTLSLSPGERATLSCRASQSVSSSYLAWYQQK |
| | | PGQAPRLLIYGASSRATGIPDRFSGSGSGTDFTLTISRLEPEDFA |
| | | VYYCQQYGSSPITFGQGTKLEIKRTVAAPSVFIFPPSDEQLKSG |
| | | TASVVCLLNNFYPREAKVQWKVDNALQSGNSQESVTEQDSK |
| | | DSTYSLSSTLTLSKADYEKHKVYACEVTHQGLSSPVTKSFNRG |
| | | ECSGGGGSQVQLQQWGAGLLKPSETLSLTCAVYGGSFSGYY |
| | | WSWIRQPPGKGLEWIGEINHRGSTNYNPSLKSRVTISGDTSKN |
| | | QFSLKLSSVNAADTAVYYCARGYSSSWYTGYVFDYWGQGTL |
| | | VTVSSASTKGPSVFPLAPSSKSTSGGTAALGCLVKDYFPEPVT |
| | | VSWNSGALTSGVHTFPAVLQSSGLYSLSSVVTVPSSSLGTQTY |
| | | ICNVNHKPSNTKVDKKVEPKSCGGGGSGGGGSGGGGSGGGG |
| | | SGGGGSGGGGSGGGGSGGGGSQSALTQPASVSGSPGQSITISC |
| | | TGTSSDVFGYDYVSWYQQHPGKAPKLMIYDVSNRPSGVSNRF |
| | | SGSKSGNAASLTISGLQAEDEADYYCSSYKSSSTVVFGGGTKL |
| | | TVLGQPKAAPSVTLFPPSSEELQANKATLVCLISDFYPGAVTV |
| | | AWKADSSPVKAGVETTTPSKQSNNKYAASSYLSLTPEQWKSH |
| | | RSYSCQVTHEGSTVEKTVAPTECSSGGGGSEVQLVESGGGLV |
| | | QPGGSLKLSCAASGFTFNKYAMNWVRQAPGKGLEWVARIRS |
| | | KYNNYATYYADSVKDRFTISRDDSKNTAYLQMNNLKTEDTA |
| | | VYYCVRHGNFGNSYISYWAYWGQGTLVTVSSGGGGSGGGGS |
| | | GGGGSQTVVTQEPSLTVSPGGTVTLTCGSSTGAVTSGNYPNW |
| | | VQQKPGQAPRGLIGGTKFLAPGTPARFSGSLLGGKAALTLSGV |
| | | QPEDEAEYYCVLWYSNRWVFGGGTKLTVLGGGGDKTHTCPP |
| | | CPAPELLGGPSVFLFPPKPKDTLMISRTPEVTCVVVDVSHEDPE |
| | | VKFNWYVDGVEVHNAKTKPCEEQYGSTYRCVSVLTVLHQD |
| | | WLNGKEYKCKVSNKALPAPIEKTISKAKGQPREPQVYTLPPSR |
| | | EEMTKNQVSLTCLVKGFYPSDIAVEWESNGQPENNYKTTPPV |
| | | LDSDGSFFLYSKLTVDKSRWQQGNVFSCSVMHEALHNHYTQ |
| | | KSLSLSPGKGGGGSGGGGSGGGGSGGGGSGGGGSGGGGSDK |
| | | THTCPPCPAPELLGGPSVFLFPPKPKDTLMISRTPEVTCVVVDV |
| | | SHEDPEVKFNWYVDGVEVHNAKTKPCEEQYGSTYRCVSVLT |
| | | VLHQDWLNGKEYKCKVSNKALPAPIEKTISKAKGQPREPQVY |
| | | TLPPSREEMTKNQVSLTCLVKGFYPSDIAVEWESNGQPENNY |
| | | KTTPPVLDSDGSFFLYSKLTVDKSRWQQGNVFSCSVMHEALH |
| | | NHYTQKSLSLSPGK |

DNA encoding CCR8 TCE 1.1 HLE of SEQ ID NO: 227
(SEQ ID NO: 590)
GAGGTGCAGCTGGTGGAATCTGGCGGAGGACTTGTGAAGCCTGGCGGCTCTCTGAGACTGTCT
TGTGCCGCTTCTGGCTTCACCTTCAGCAACGCCAGAATGGGCTGGGTCCGACAGGCTCCTGGA
AAGTGTCTGGAATGGGTCGGACGGATCAAGTCCAAGACCGAAGGCGGCACCAGAGACTACGCC
GCTCCTGTGAAGGGCAGATTCACCATCTCTCGGGACGACTCCAAGAACACCCTGTACCTGCAG
ATGAACTCCCTGAAAACCGAGGACACCGCCGTGTACTACTGCACCTCTTACTCTGGCGTGTGG
GGCCAGGGCACAATGGTCACAGTTTCTAGCGGCGGAGGTGGACAAGGTGGTGGCGGACAAGGC
GGCGGTGGTCAAGAGATTGTGATGACCCAGTCTCCTGACAGCCTGGCCGTGTCTCTGGGAGAG
AGAGCCACCATCAACTGCAAGTCCAGCCAGTCCGTGCTGTACTCCTCCAACAACAAGAACTAC
CTGGCCTGGTATCACCAGAAGCCAGGCCAGTCTCCAAAGCTGCTGATCTCCTGGGCCTCCACC
AGAGAAAGCGGCGTGCCCGATAGATTCTCCGGCTCTGGCTCTGGCACCGACTTCACCCTGACC
ATCAATTCCCTGCAGGCCGAGGATGTGGCTGTGTACTATTGCCAGCAGTACTACAGCATCCCC
ATCACCTTCGGCTGCGGCACCAAGGTGGAAATCAAGTCCGGAGGTGGAGGGCAGGAAGTGCAG
CTGGTTGAATCTGGCGGCGGATTGGTTCAGCCTGGCGGATCTCTGAAGCTGTCTTGTGCCGCC
TCTGGCTTCACCTTCAACAAATACGCCATCAACTGGGTCCGACAGGCCCCTGGCAAAGGACTG
GAATGGGTCGCCCGGATCAGATCCAAGTACAACAACTACGCTACCTACTACGCCGACGCCGTG
AAGGACCGGTTCACCATCTCCAGAGATGACTCCAAGAACACCGTGTACCTGCAGATGAACAAC
CTCAAGACCGAGGACACCGCCGTGTACTACTGTGCCAGAGCCGGCAACTTCGGCTCCTCCTAC
ATCAGCTACTGGGCCTATTGGGGCCAGGGCACACTGGTCACAGTTAGTTCAGGTGGCGGTGGA
CAGGGCGGCGGAGGTCAGGGTGGCGGAGGCCAGCAAACAGTGGTCACCCAAGAGCCTAGCCTG
ACCGTTTCTCCTGGCGGCACCGTGACCATCACCTGTGGATCTTCTACCGGCGCTGTGACCTCC
GGCAACTACCCTAATTGGGTGCAGAAGAAGCCCGGCCAGGCTCCTAGAGGACTGATCGGAGGC
ACCAAGTTTCTGGCTCCCGGCACTCCTGCCAGATTCTCCGGTTCTCTGTCTGGCGGAAAGGCC
GCTCTGACATTGTCTGGCGTGCAGCCTGAGGATGAGGCTGAGTACTATTGCGTGCTGTGGTAC
TCCAACAGATGGGTGTTCGGCTCCGGCACCAAGCTGACAGTTCTCGGCGGAGGTGGATGCCCT
CCTTGTCCTGCTCCTGAATTGCTCGGCGGACCCTCCGTGTTCCTGTTTCCTCCAAAGCCTAAG
GACACCCTGATGATCTCTCGTACGCCTGAAGTGACCTGCGTGGTGGTGGATGTGTCCCACGAG
GAACCCGAAGTGAAGTTCAATTGGTACGTGGACGGCGTGGAAGTGCACAACGCCAAGACAAAG
CCCTGCGAGGAACAGTACGGCTCCACCTACAGATGCGTGTCCGTGCTGACAGTGCTGCACCAG
GATTGGCTGAACGGCAAAGAGTACAAGTGCAAGGTGTCCAACAAGGCCCTGCCTGCTCCTATC
GAAAAGACCATCTCCAAGGCCAAGGGCCAGCCTAGAGAGCCCCAGGTTTACACCCTGCCTCCA
AGCAGAGAAGAGATGACCAAGAACCAGGTGTCCCTGACCTGCCTGGTCAAGGGCTTCTACCCT
TCCGATATCGCCGTGGAATGGGAGAGCAATGGACAGCCCGAGAACAACTACAAGACCACACCT
CCTGTGCTGGACTCCGACGGCTCATTCTTCCTGTACTCCAAGCTGACCGTGGACAAGTCCAGA
TGGCAGCAGGGCAACGTGTTCTCCTGCTCCGTGATGCACGAGGCCCTGCACAATCACTACACC
CAGAAGTCCCTGTCTCTGTCCCCTGGAGGCGGAGGACAAGGCGGAGGTGGTCAAGGTGGTGGT
GGCCAAGGCGGAGGCGGACAAGGCGGCGGAGGACAAGGTGGCGGTGGACAGTGTCCTCCATGT
CCAGCACCTGAGCTTCTCGGAGGCCCTTCTGTGTTTCTGTTCCCACCTAAGCCAAAGGATACA
CTCATGATCAGCCGCACACCTGAAGTCACATGTGTCGTCGTGGATGTCTCTCATGAAGAACCA
GAAGTCAAGTTTAATTGGTATGTCGATGGCGTCGAGGTCCACAATGCTAAGACCAAGCCTTGT
GAAGAACAATATGGCAGCACCTATCGCTGTGTGTCTGTCCTGACCGTCCTGCATCAAGACTGG
CTCAATGGGAAAGAATACAAATGCAAAGTCTCTAACAAAGCTCTGCCCGCACCAATCGAGAAA
ACCATCAGCAAGGCTAAAGGACAGCCTCGCGAGCCTCAAGTGTATACCCTGCCACCTTCTCGC
GAGGAAATGACAAAAAATCAAGTCTCCCTCACCTGTCTCGTGAAGGGATTCTATCCCAGCGAC
ATTGCCGTCGAGTGGGAGTCTAATGGCCAGCCTGAAAACAATTATAAGACAACCCCACCTGTC
CTGGACAGCGACGGCTCATTTTTTCTCTACTCTAAACTCACCGTGGATAAGAGCCGGTGGCAA
CAGGGAAATGTGTTCAGCTGTAGCGTGATGCATGAAGCTCTCCACAACCATTATACACAGAAG
AGTCTGAGCCTGTCTCCTGGCAAATGA
DNA encoding CCR8 TCE 1.2 HLE of SEQ ID NO: 238
(SEQ ID NO: 591)
GAGGTGCAGCTGGTGGAATCTGGCGGAGGACTTGTGAAGCCTGGCGGCTCTCTGAGACTGTCT
TGTGCCGCTTCTGGCTTCACCTTCAGCAACGCCAGAATGGGCTGGGTCCGACAGGCTCCTGGA
AAGTGTCTGGAATGGGTCGGACGGATCAAGTCCAAGACCGAAGGCGGCACCAGAGACTACGCC
GCTCCTGTGAAGGGCAGATTCACCATCTCTCGGGACGACTCCAAGAACACCCTGTACCTGCAG
ATGAACTCCCTGAAAACCGAGGACACCGCCGTGTACTACTGCACCTCTTACTCTGGCGTGTGG
GGCCAGGGCACAATGGTCACAGTTTCTAGCGGCGGAGGTGGACAAGGTGGTGGCGGACAAGGC
GGCGGTGGTCAAGAGATTGTGATGACCCAGTCTCCTGACAGCCTGGCCGTGTCTCTGGGAGAG
AGAGCCACCATCAACTGCAAGTCCAGCCAGTCCGTGCTGTACTCCTCCAACAACAAGAACTAC
CTGGCCTGGTATCACCAGAAGCCAGGCCAGTCTCCAAAGCTGCTGATCTCCTGGGCCTCCACC
AGAGAAAGCGGCGTGCCCGATAGATTCTCCGGCTCTGGCTCTGGCACCGACTTCACCCTGACC
ATCAATTCCCTGCAGGCCGAGGATGTGGCTGTGTACTATTGCCAGCAGTACTACAGCATCCCC
ATCACCTTCGGCTGCGGCACCAAGGTGGAAATCAAGTCCGGAGGTGGAGGGCAGGAAGTGCAG
CTGGTTGAATCTGGCGGCGGATTGGTTCAGCCTGGCGGATCTCTGAAGCTGTCTTGTGCCGCC
TCTGGCTTCACCTTCAACAAATACGCCATCAACTGGGTCCGACAGGCCCCTGGCAAAGGACTG
GAATGGGTCGCCCGGATCAGATCCAAGTACAACAACTACGCTACCTACTACGCCGACGCCGTG
AAGGACCGGTTCACCATCTCCAGAGATGACTCCAAGAACACCGTGTACCTGCAGATGAACAAC
CTCAAGACCGAGGACACCGCCGTGTACTACTGTGCCAGAGCCGGCAACTTCGGCTCCTCCTAC
ATCAGCTACTGGGCCTATTGGGGCCAGGGCACACTGGTCACAGTTAGTTCAGGTGGCGGTGGA
CAGGGCGGCGGAGGTCAGGGTGGCGGAGGCCAGCAAACAGTGGTCACCCAAGAGCCTAGCCTG
ACCGTTTCTCCTGGCGGCACCGTGACCATCACCTGTGGATCTTCTACCGGCGCTGTGACCTCC
GGCAACTACCCTAATTGGGTGCAGAAGAAGCCCGGCCAGGCTCCTAGAGGACTGATCGGAGGC
ACCAAGTTTCTGGCTCCCGGCACTCCTGCCAGATTCTCCGGTTCTCTGTCTGGCGGAAAGGCC
GCTCTGACATTGTCTGGCGTGCAGCCTGAGGATGAGGCTGAGTACTATTGCGTGCTGTGGTAC
TCCAACAGATGGGTGTTCGGCTCCGGCACCAAGCTGACAGTTCTCGGCGGAGGTGGATGCCCT
CCTTGTCCTGCTCCTGAATTGCTCGGCGGACCCTCCGTGTTCCTGTTTCCTCCAAAGCCTAAG
GACACCCTGTACATCACCCGCGAGCCTGAAGTGACCTGCGTGGTGGTGGATGTGTCCCACGAG
GAACCCGAAGTGAAGTTCAATTGGTACGTGGACGGCGTGGAAGTGCACAACGCCAAGACAAAG
CCCTGCGAGGAACAGTACGGCTCCACCTACAGATGCGTGTCCGTGCTGACAGTGCTGCACCAG
GATTGGCTGAACGGCAAAGAGTACAAGTGCAAGGTGTCCAACAAGGCCCTGCCTGCTCCTATC
GAAAAGACCATCTCCAAGGCCAAGGGCCAGCCTAGAGAGCCCCAGGTTTACACCCTGCCTCCA
AGCAGAGAAGAGATGACCAAGAACCAGGTGTCCCTGACCTGCCTGGTCAAGGGCTTCTACCCT
TCCGATATCGCCGTGGAATGGGAGAGCAATGGACAGCCCGAGAACAACTACAAGACCACACCT
CCTGTGCTGGACTCCGACGGCTCATTCTTCCTGTACTCCAAGCTGACCGTGGACAAGTCCAGA
TGGCAGCAGGGCAACGTGTTCTCCTGCTCCGTGATGCACGAGGCCCTGCACAATCACTACACC
CAGAAGTCCCTGTCTCTGTCCCCTGGAGGCGGAGGACAAGGCGGAGGTGGTCAAGGTGGTGGT
GGCCAAGGCGGAGGCGGACAAGGCGGCGGAGGACAAGGTGGCGGTGGACAGTGTCCTCCATGT
CCAGCACCTGAGCTTCTCGGAGGCCCTTCTGTGTTTCTGTTCCCACCTAAGCCAAAGGATACA
CTCTACATCACCCGCGAGCCTGAAGTCACATGTGTCGTCGTGGATGTCTCTCATGAAGAACCA
GAAGTCAAGTTTAATTGGTATGTCGATGGCGTCGAGGTCCACAATGCTAAGACCAAGCCTTGT
GAAGAACAATATGGCAGCACCTATCGCTGTGTGTCTGTCCTGACCGTCCTGCATCAAGACTGG
CTCAATGGGAAAGAATACAAATGCAAAGTCTCTAACAAAGCTCTGCCCGCACCAATCGAGAAA
ACCATCAGCAAGGCTAAAGGACAGCCTCGCGAGCCTCAAGTGTATACCCTGCCACCTTCTCGC
GAGGAAATGACAAAAAATCAAGTCTCCCTCACCTGTCTCGTGAAGGGATTCTATCCCAGCGAC
ATTGCCGTCGAGTGGGAGTCTAATGGCCAGCCTGAAAACAATTATAAGACAACCCCACCTGTC
CTGGACAGCGACGGCTCATTTTTTCTCTACTCTAAACTCACCGTGGATAAGAGCCGGTGGCAA
CAGGGAAATGTGTTCAGCTGTAGCGTGATGCATGAAGCTCTCCACAACCATTATACACAGAAG
AGTCTGAGCCTGTCTCCTGGCAAATGA
DNA encoding CCR8 TCE 1.3 HLE of SEQ ID NO: 249
(SEQ ID NO: 592)
GAGGTGCAGCTGGTGGAATCTGGCGGAGGACTTGTGAAGCCTGGCGGCTCTCTGAGACTGTCT
TGTGCCGCTTCTGGCTTCACCTTCAGCAACGCCAGAATGGGCTGGGTCCGACAGGCTCCTGGA
AAAGGACTGGAATGGGTCGGACGGATCAAGTCCAAGACCGAAGGCGGCACCAGAGACTACGCC
GCTCCTGTGAAGGGCAGATTCACCATCTCTCGGGACGACTCCAAGAACACCCTGTACCTGCAG
ATGAACTCCCTGAAAACCGAGGACACCGCCGTGTACTACTGCACCTCTTACTCTGGCGTGTGG
GGCCAGGGCACAATGGTCACAGTTTCTTCCGCCTCCACCAAGGGACCCAGCGTTTTCCCTCTG
GCTCCATCCTCCAAGTCTACCTCTGGCGGAACAGCTGCTCTGGGCTGCCTGGTCAAGGACTAC
TTTCCTGAGCCTGTGACCGTGTCCTGGAACTCTGGCGCTCTGACATCTGGCGTGCACACCTTT
CCAGCTGTGCTGCAGTCCTCCGGCCTGTACTCTCTGTCCTCTGTCGTGACCGTGCCTTCCAGC
TCTCTGGGAACCCAGACCTACATCTGCAATGTGAACCACAAGCCTTCCAACACCAAGGTGGAC
AAGAAGGTGGAACCCAAGTCTTGTGGCGGAGGCGGACAAGGTGGTGGTGGTCAAGGTGGCGGA
GGACAAGGCGGTGGCGGCCAAGGCGGAGGTGGACAAGGCGGCGGAGGCCAAGGTGGCGGCGGT
CAAGGCGGCGGTGGTCAAGAAATTGTGATGACCCAGTCTCCTGACAGCCTGGCCGTGTCTCTG
GGAGAGAGAGCCACCATCAACTGCAAGTCCAGCCAGTCCGTGCTGTACTCCTCCAACAACAAG
AACTACCTGGCCTGGTATCACCAGAAGCCAGGCCAGTCTCCAAAGCTGCTGATCTCCTGGGCC
TCTACCAGAGAATCCGGCGTGCCCGACAGATTTTCCGGCTCTGGCTCTGGCACCGACTTCACC
CTGACCATCAATTCCCTGCAGGCCGAGGATGTGGCTGTGTACTATTGCCAGCAGTACTACAGC
ATCCCCATCACCTTCGGAGGTGGCACCAAGGTCGAGATCAAGAGAACCGTGGCCGCTCCTTCC
GTGTTCATCTTCCCACCTTCCGACGAGCAGCTGAAGTCCGGCACAGCTTCTGTCGTGTGCCTG
CTGAACAACTTCTACCCTCGGGAAGCCAAGGTGCAGTGGAAAGTGGATAACGCCCTGCAGTCC
GGCAACTCCCAAGAGTCTGTGACCGAGCAGGACTCCAAGGACAGCACCTACAGCCTGTCCTCC
ACACTGACCCTGTCCAAGGCCGACTACGAGAAGCACAAGGTGTACGCCTGCGAAGTGACCCAT
CAGGGCCTGTCTAGCCCTGTGACCAAGTCTTTCAACCGGGGCGAGTGTTCCGGAGGTGGAGGG
CAGGAAGTGCAGCTGGTTGAATCTGGCGGCGGATTGGTTCAGCCTGGCGGATCTCTGAAGCTG
TCTTGTGCCGCCTCTGGCTTCACCTTCAACAAATACGCCATCAACTGGGTCCGACAGGCCCCT
GGCAAAGGACTGGAATGGGTCGCCCGGATCAGATCCAAGTACAACAACTACGCTACCTACTAC
GCCGACGCCGTGAAGGACCGGTTCACCATCTCCAGAGATGACTCCAAGAACACCGTGTACCTG
CAGATGAACAACCTCAAGACCGAGGACACCGCCGTGTACTACTGTGCCAGAGCCGGCAACTTC
GGCTCCTCCTACATCAGCTACTGGGCCTATTGGGGCCAGGGCACACTGGTCACAGTTAGTTCA
GGTGGCGGTGGACAGGGCGGCGGAGGTCAGGGTGGCGGAGGCCAGCAAACAGTGGTCACCCAA
GAGCCTAGCCTGACCGTTTCTCCTGGCGGCACCGTGACCATCACCTGTGGATCTTCTACCGGC
GCTGTGACCTCCGGCAACTACCCTAATTGGGTGCAGAAGAAGCCCGGCCAGGCTCCTAGAGGA
CTGATCGGAGGCACCAAGTTTCTGGCTCCCGGCACTCCTGCCAGATTCTCCGGTTCTCTGTCT
GGCGGAAAGGCCGCTCTGACATTGTCTGGCGTGCAGCCTGAGGATGAGGCTGAGTACTATTGC
GTGCTGTGGTACTCCAACAGATGGGTGTTCGGCTCCGGCACCAAGCTGACAGTTCTCGGCGGA
GGTGGATGCCCTCCTTGTCCTGCTCCTGAATTGCTCGGCGGACCCTCCGTGTTCCTGTTTCCT
CCAAAGCCTAAGGACACCCTGATGATCTCTCGTACGCCTGAAGTGACCTGCGTGGTGGTGGAT
GTGTCCCACGAGGAACCCGAAGTGAAGTTCAATTGGTACGTGGACGGCGTGGAAGTGCACAAC
GCCAAGACAAAGCCCTGCGAGGAACAGTACGGCTCCACCTACAGATGCGTGTCCGTGCTGACA
GTGCTGCACCAGGATTGGCTGAACGGCAAAGAGTACAAGTGCAAGGTGTCCAACAAGGCCCTG
CCTGCTCCTATCGAAAAGACCATCTCCAAGGCCAAGGGCCAGCCTAGAGAGCCCCAGGTTTAC
ACCCTGCCTCCAAGCAGAGAAGAGATGACCAAGAACCAGGTGTCCCTGACCTGCCTGGTCAAG
GGCTTCTACCCTTCCGATATCGCCGTGGAATGGGAGAGCAATGGACAGCCCGAGAACAACTAC
AAGACCACACCTCCTGTGCTGGACTCCGACGGCTCATTCTTCCTGTACTCCAAGCTGACCGTG
GACAAGTCCAGATGGCAGCAGGGCAACGTGTTCTCCTGCTCCGTGATGCACGAGGCCCTGCAC
AATCACTACACCCAGAAGTCCCTGTCTCTGTCCCCTGGAGGCGGAGGACAAGGCGGAGGTGGT
CAAGGTGGTGGTGGCCAAGGCGGAGGCGGACAAGGCGGCGGAGGACAAGGTGGCGGTGGACAG
TGTCCTCCATGTCCAGCACCTGAGCTTCTCGGAGGCCCTTCTGTGTTTCTGTTCCCACCTAAG
CCAAAGGATACACTCATGATCAGCCGCACACCTGAAGTCACATGTGTCGTCGTGGATGTCTCT
CATGAAGAACCAGAAGTCAAGTTTAATTGGTATGTCGATGGCGTCGAGGTCCACAATGCTAAG
ACCAAGCCTTGTGAAGAACAATATGGCAGCACCTATCGCTGTGTGTCTGTCCTGACCGTCCTG
CATCAAGACTGGCTCAATGGGAAAGAATACAAATGCAAAGTCTCTAACAAAGCTCTGCCCGCA
CCAATCGAGAAAACCATCAGCAAGGCTAAAGGACAGCCTCGCGAGCCTCAAGTGTATACCCTG
CCACCTTCTCGCGAGGAAATGACAAAAAATCAAGTCTCCCTCACCTGTCTCGTGAAGGGATTC
TATCCCAGCGACATTGCCGTCGAGTGGGAGTCTAATGGCCAGCCTGAAAACAATTATAAGACA
ACCCCACCTGTCCTGGACAGCGACGGCTCATTTTTTCTCTACTCTAAACTCACCGTGGATAAG
AGCCGGTGGCAACAGGGAAATGTGTTCAGCTGTAGCGTGATGCATGAAGCTCTCCACAACCAT
TATACACAGAAGAGTCTGAGCCTGTCTCCTGGCAAATGA
DNA encoding the CCR8 TCE 1.4 HLE of SEQ ID NO: 260
(SEQ ID NO: 593)
GAGGTGCAGCTGGTGGAATCTGGCGGAGGACTTGTGAAGCCTGGCGGCTCTCTGAGACTGTCT
TGTGCCGCTTCTGGCTTCACCTTCAGCAACGCCAGAATGGGCTGGGTCCGACAGGCTCCTGGA
AAAGGACTGGAATGGGTCGGACGGATCAAGTCCAAGACCGAAGGCGGCACCAGAGACTACGCC
GCTCCTGTGAAGGGCAGATTCACCATCTCTCGGGACGACTCCAAGAACACCCTGTACCTGCAG
ATGAACTCCCTGAAAACCGAGGACACCGCCGTGTACTACTGCACCTCTTACTCTGGCGTGTGG
GGCCAGGGCACAATGGTCACAGTTTCTTCCGCCTCCACCAAGGGACCCAGCGTTTTCCCTCTG
GCTCCATCCTCCAAGTCTACCTCTGGCGGAACAGCTGCTCTGGGCTGCCTGGTCAAGGACTAC
TTTCCTGAGCCTGTGACCGTGTCCTGGAACTCTGGCGCTCTGACATCTGGCGTGCACACCTTT
CCAGCTGTGCTGCAGTCCTCCGGCCTGTACTCTCTGTCCTCTGTCGTGACCGTGCCTTCCAGC
TCTCTGGGAACCCAGACCTACATCTGCAATGTGAACCACAAGCCTTCCAACACCAAGGTGGAC
AAGAAGGTGGAACCCAAGTCTTGTGGCGGAGGCGGACAAGGTGGTGGTGGTCAAGGTGGCGGA
GGACAAGGCGGTGGCGGCCAAGGCGGAGGTGGACAAGGCGGCGGAGGCCAAGGTGGCGGCGGT
CAAGGCGGCGGTGGTCAAGAAATTGTGATGACCCAGTCTCCTGACAGCCTGGCCGTGTCTCTG
GGAGAGAGAGCCACCATCAACTGCAAGTCCAGCCAGTCCGTGCTGTACTCCTCCAACAACAAG
AACTACCTGGCCTGGTATCACCAGAAGCCAGGCCAGTCTCCAAAGCTGCTGATCTCCTGGGCC
TCTACCAGAGAATCCGGCGTGCCCGACAGATTTTCCGGCTCTGGCTCTGGCACCGACTTCACC
CTGACCATCAATTCCCTGCAGGCCGAGGATGTGGCTGTGTACTATTGCCAGCAGTACTACAGC
ATCCCCATCACCTTCGGAGGTGGCACCAAGGTCGAGATCAAGAGAACCGTGGCCGCTCCTTCC
GTGTTCATCTTCCCACCTTCCGACGAGCAGCTGAAGTCCGGCACAGCTTCTGTCGTGTGCCTG
CTGAACAACTTCTACCCTCGGGAAGCCAAGGTGCAGTGGAAAGTGGATAACGCCCTGCAGTCC
GGCAACTCCCAAGAGTCTGTGACCGAGCAGGACTCCAAGGACAGCACCTACAGCCTGTCCTCC
ACACTGACCCTGTCCAAGGCCGACTACGAGAAGCACAAGGTGTACGCCTGCGAAGTGACCCAT
CAGGGCCTGTCTAGCCCTGTGACCAAGTCTTTCAACCGGGGCGAGTGTTCCGGAGGTGGAGGG
CAGGAAGTGCAGCTGGTTGAATCTGGCGGCGGATTGGTTCAGCCTGGCGGATCTCTGAAGCTG
TCTTGTGCCGCCTCTGGCTTCACCTTCAACAAATACGCCATCAACTGGGTCCGACAGGCCCCT
GGCAAAGGACTGGAATGGGTCGCCCGGATCAGATCCAAGTACAACAACTACGCTACCTACTAC
GCCGACGCCGTGAAGGACCGGTTCACCATCTCCAGAGATGACTCCAAGAACACCGTGTACCTG
CAGATGAACAACCTCAAGACCGAGGACACCGCCGTGTACTACTGTGCCAGAGCCGGCAACTTC
GGCTCCTCCTACATCAGCTACTGGGCCTATTGGGGCCAGGGCACACTGGTCACAGTTAGTTCA
GGTGGCGGTGGACAGGGCGGCGGAGGTCAGGGTGGCGGAGGCCAGCAAACAGTGGTCACCCAA
GAGCCTAGCCTGACCGTTTCTCCTGGCGGCACCGTGACCATCACCTGTGGATCTTCTACCGGC
GCTGTGACCTCCGGCAACTACCCTAATTGGGTGCAGAAGAAGCCCGGCCAGGCTCCTAGAGGA
CTGATCGGAGGCACCAAGTTTCTGGCTCCCGGCACTCCTGCCAGATTCTCCGGTTCTCTGTCT
GGCGGAAAGGCCGCTCTGACATTGTCTGGCGTGCAGCCTGAGGATGAGGCTGAGTACTATTGC
GTGCTGTGGTACTCCAACAGATGGGTGTTCGGCTCCGGCACCAAGCTGACAGTTCTCGGCGGA
GGTGGATGCCCTCCTTGTCCTGCTCCTGAATTGCTCGGCGGACCCTCCGTGTTCCTGTTTCCT
CCAAAGCCTAAGGACACCCTGTACATCACCCGCGAGCCTGAAGTGACCTGCGTGGTGGTGGAT
GTGTCCCACGAGGAACCCGAAGTGAAGTTCAATTGGTACGTGGACGGCGTGGAAGTGCACAAC
GCCAAGACAAAGCCCTGCGAGGAACAGTACGGCTCCACCTACAGATGCGTGTCCGTGCTGACA
GTGCTGCACCAGGATTGGCTGAACGGCAAAGAGTACAAGTGCAAGGTGTCCAACAAGGCCCTG
CCTGCTCCTATCGAAAAGACCATCTCCAAGGCCAAGGGCCAGCCTAGAGAGCCCCAGGTTTAC
ACCCTGCCTCCAAGCAGAGAAGAGATGACCAAGAACCAGGTGTCCCTGACCTGCCTGGTCAAG
GGCTTCTACCCTTCCGATATCGCCGTGGAATGGGAGAGCAATGGACAGCCCGAGAACAACTAC
AAGACCACACCTCCTGTGCTGGACTCCGACGGCTCATTCTTCCTGTACTCCAAGCTGACCGTG
GACAAGTCCAGATGGCAGCAGGGCAACGTGTTCTCCTGCTCCGTGATGCACGAGGCCCTGCAC
AATCACTACACCCAGAAGTCCCTGTCTCTGTCCCCTGGAGGCGGAGGACAAGGCGGAGGTGGT
CAAGGTGGTGGTGGCCAAGGCGGAGGCGGACAAGGCGGCGGAGGACAAGGTGGCGGTGGACAG
TGTCCTCCATGTCCAGCACCTGAGCTTCTCGGAGGCCCTTCTGTGTTTCTGTTCCCACCTAAG
CCAAAGGATACACTCTACATCACCCGCGAGCCTGAAGTCACATGTGTCGTCGTGGATGTCTCT
CATGAAGAACCAGAAGTCAAGTTTAATTGGTATGTCGATGGCGTCGAGGTCCACAATGCTAAG
ACCAAGCCTTGTGAAGAACAATATGGCAGCACCTATCGCTGTGTGTCTGTCCTGACCGTCCTG
CATCAAGACTGGCTCAATGGGAAAGAATACAAATGCAAAGTCTCTAACAAAGCTCTGCCCGCA
CCAATCGAGAAAACCATCAGCAAGGCTAAAGGACAGCCTCGCGAGCCTCAAGTGTATACCCTG
CCACCTTCTCGCGAGGAAATGACAAAAAATCAAGTCTCCCTCACCTGTCTCGTGAAGGGATTC
TATCCCAGCGACATTGCCGTCGAGTGGGAGTCTAATGGCCAGCCTGAAAACAATTATAAGACA
ACCCCACCTGTCCTGGACAGCGACGGCTCATTTTTTCTCTACTCTAAACTCACCGTGGATAAG
AGCCGGTGGCAACAGGGAAATGTGTTCAGCTGTAGCGTGATGCATGAAGCTCTCCACAACCAT
TATACACAGAAGAGTCTGAGCCTGTCTCCTGGCAAATGA
Leader polynucleotide sequence
(SEQ ID NO: 594)
ATGGACATGAGAGTGCCTGCACAGCTGCTGGGCCTGCTGCTGCTGTGGCTGAGAGGCGCCAGA
TG

TABLE 26
Anti-CCR8 molecule sequences.

| SEQ | | |
|---|---|---|
| ID NO: | Designation | Sequence |
| 595 | MPK20298-A4_SCFV huCCR8 HV hv_cdr1 | NNGMH |
| 596 | MPK20298-A4_SCFV huCCR8 HV hv_cdr2 | VISNDGSNKYYADSVKG |
| 597 | MPK20298-A4_SCFV huCCR8 HV hv_cdr3 | VYYGSGIYYKNRNYYGMDV |
| 598 | MPK20298-A4_SCFV huCCR8 LV lv_cdr1 | GGNNIGSQNVH |
| 599 | MPK20298-A4_SCFV huCCR8 LV lv_cdr2 | RDSNRPS |
| 600 | MPK20298-A4_SCFV huCCR8 LV lv_cdr3 | QVWDSSTVV |
| 601 | MPK20299-D2_SCFV huCCR8 HV hv_cdr1 | NYGMH |
| 602 | MPK20299-D2_SCFV huCCR8 HV hv_cdr2 | VISYDGSNKYYADSVKG |
| 603 | MPK20299-D2_SCFV huCCR8 HV hv_cdr3 | VYYGSGIYYKKRYYYGMDV |
| 604 | MPK20299-D2_SCFV huCCR8 LV lv_cdr1 | GGHNIGSKGVH |
| 605 | MPK20299-D2_SCFV huCCR8 LV lv_cdr2 | RNSNRPS |
| 606 | MPK20299-D2_SCFV huCCR8 LV lv_cdr3 | QVWDSSTVV |
| 607 | MPK20299-F11_SCFV huCCR8 HV hv_cdr1 | NYGMH |
| 608 | MPK20299-F11_SCFV huCCR8 HV hv_cdr2 | VISYDGSNKYYADSVKG |
| 609 | MPK20299-F11_SCFV huCCR8 HV hv_cdr3 | VYYGSGSYYKKRYYYGMDV |
| 610 | MPK20299-F11_SCFV huCCR8 LV lv_cdr1 | GGNNIGSQNVH |
| 611 | MPK20299-F11_SCFV huCCR8 LV lv_cdr2 | RDSNRPS |
| 612 | MPK20299-F11_SCFV huCCR8 LV lv_cdr3 | QVWDSSTVV |
| 613 | MPK20298-H6_SCFV huCCR8 HV hv_cdr1 | SSGMH |
| 614 | MPK20298-H6_SCFV huCCR8 HV hv_cdr2 | VISYDGTNKYYADSVKG |
| 615 | MPK20298-H6_SCFV huCCR8 HV hv_cdr3 | VYYGSGIYYKNRYYYGMDV |
| 616 | MPK20298-H6_SCFV huCCR8 LV lv_cdr1 | GGHNIGSKGVH |
| 617 | MPK20298-H6_SCFV huCCR8 LV lv_cdr2 | RNSNRPS |
| 618 | MPK20298-H6_SCFV huCCR8 LV lv_cdr3 | QVWDSSTVV |
| 619 | MPK20297-A4_SCFV huCCR8 HV hv_cdr1 | NYGMH |
| 620 | MPK20297-A4_SCFV huCCR8 HV hv_cdr2 | VISNDGSNKYYADSVKG |
| 621 | MPK20297-A4_SCFV huCCR8 HV hv_cdr3 | VYYGSGIYYKKRYYYGMDV |
| 622 | MPK20297-A4_SCFV huCCR8 LV lv_cdr1 | GGHNIGSQNVH |
| 623 | MPK20297-A4_SCFV huCCR8 LV lv_cdr2 | RDSNRPS |
| 624 | MPK20297-A4_SCFV huCCR8 LV lv_cdr3 | QVWDSSTVV |
| 625 | MPK20299-H8_SCFV huCCR8 HV hv_cdr1 | NYGMH |
| 626 | MPK20299-H8_SCFV huCCR8 HV hv_cdr2 | VISYDGSNKYYADSVKG |
| 627 | MPK20299-H8_SCFV huCCR8 HV hv_cdr3 | VYYGSGIYYKKRYYYGMDV |
| 628 | MPK20299-H8_SCFV huCCR8 LV lv_cdr1 | GGNNIGSKNVH |
| 629 | MPK20299-H8_SCFV huCCR8 LV lv_cdr2 | RNSNRPS |
| 630 | MPK20299-H8_SCFV huCCR8 LV lv_cdr3 | QVWDSSTVV |
| 631 | MPK20300-C11_SCFV huCCR8 HV | SYGMH |
| | hv_cdr1 | |
| 632 | MPK20300-C11_SCFV huCCR8 HV | VISYDGSNKYYADSVKG |
| | hv_cdr2 | |
| 633 | MPK20300-C11_SCFV huCCR8 HV | VYYGSGSYYKNRYYYGMDV |
| | hv_cdr3 | |
| 634 | MPK20300-C11_SCFV huCCR8 LV lv_cdr1 | GGNNIGSKNVH |
| 635 | MPK20300-C11_SCFV huCCR8 LV lv_cdr2 | RDINRPS |
| 636 | MPK20300-C11_SCFV huCCR8 LV lv_cdr3 | QVWDSSVV |
| 637 | MPK20298-B1_SCFV huCCR8 HV hv_cdr1 | NYGMH |
| 638 | MPK20298-B1_SCFV huCCR8 HV hv_cdr2 | VISYDGSNKYYADSVKG |
| 639 | MPK20298-B1_SCFV huCCR8 HV hv_cdr3 | VYYGSGIYYKKRYYYGMDV |
| 640 | MPK20298-B1_SCFV huCCR8 LV lv_cdr1 | EGNNIGSKNVH |
| 641 | MPK20298-B1_SCFV huCCR8 LV lv_cdr2 | RNSNRPS |
| 642 | MPK20298-B1_SCFV huCCR8 LV lv_cdr3 | QAWDSSTVV |
| 643 | MPK20297-E5_SCFV huCCR8 HV hv_cdr1 | NNGMH |
| 644 | MPK20297-E5_SCFV huCCR8 HV hv_cdr2 | VISYDGSNKYYTDSVKG |
| 645 | MPK20297-E5_SCFV huCCR8 HV hv_cdr3 | VYYGSGIYYKKRYYYGMDV |
| 646 | MPK20297-E5_SCFV huCCR8 LV lv_cdr1 | GGNNIGSKNVH |
| 647 | MPK20297-E5_SCFV huCCR8 LV lv_cdr2 | RDSNRPS |
| 648 | MPK20297-E5_SCFV huCCR8 LV lv_cdr3 | QVWDSSSDHVV |
| 649 | MPK20299-A3_SCFV huCCR8 HV hv_cdr1 | NYGMH |
| 650 | MPK20299-A3_SCFV huCCR8 HV hv_cdr2 | VISYDGSNKYYADSVKG |
| 651 | MPK20299-A3_SCFV huCCR8 HV hv_cdr3 | VYYGSGIYYKKRYYYGMDV |
| 652 | MPK20299-A3_SCFV huCCR8 LV lv_cdr1 | GGNNIGSKNVH |
| 653 | MPK20299-A3_SCFV huCCR8 LV lv_cdr2 | RNSNRPS |
| 654 | MPK20299-A3_SCFV huCCR8 LV lv_cdr3 | QAWDSSNVV |
| 655 | MPK20297-B4_SCFV huCCR8 HV hv_cdr1 | RNGMH |
| 656 | MPK20297-B4_SCFV huCCR8 HV hv_cdr2 | VISNDGSNKYYADSVKG |
| 657 | MPK20297-B4_SCFV huCCR8 HV hv_cdr3 | VYYGSGIYYKNNYYYGMDV |
| 658 | MPK20297-B4_SCFV huCCR8 LV lv_cdr1 | GGNNIGSQNVH |
| 659 | MPK20297-B4_SCFV huCCR8 LV lv_cdr2 | RDSNRPS |
| 660 | MPK20297-B4_SCFV huCCR8 LV lv_cdr3 | QVWDSSTVV |
| 661 | MPK20298-F6_SCFV huCCR8 HV hv_cdr1 | RNGMH |
| 662 | MPK20298-F6_SCFV huCCR8 HV hv_cdr2 | VISNDGSNKYYADSVKG |
| 663 | MPK20298-F6_SCFV huCCR8 HV hv_cdr3 | VYYGSGIYYKNRYYYGMDV |
| 664 | MPK20298-F6_SCFV huCCR8 LV lv_cdr1 | GGNNIGSKNVH |
| 665 | MPK20298-F6_SCFV huCCR8 LV lv_cdr2 | RDSNRPS |
| 666 | MPK20298-F6_SCFV huCCR8 LV lv_cdr3 | QVWDSSTVV |
| 667 | MPK20299-H3_SCFV huCCR8 HV hv_cdr1 | NYGMH |
| 668 | MPK20299-H3_SCFV huCCR8 HV hv_cdr2 | VISYDGSNKYYADSVKG |
| 669 | MPK20299-H3_SCFV huCCR8 HV hv_cdr3 | VYYGSGIYYKKRYYYGMDV |
| 670 | MPK20299-H3_SCFV huCCR8 LV lv_cdr1 | GGNNIGSKNVH |
| 671 | MPK20299-H3_SCFV huCCR8 LV lv_cdr2 | RNSNRPS |
| 672 | MPK20299-H3_SCFV huCCR8 LV lv_cdr3 | QIWDSSTVV |
| 673 | MPK20298-B9_SCFV huCCR8 HV hv_cdr1 | RNGMH |
| 674 | MPK20298-B9_SCFV huCCR8 HV hv_cdr2 | VISNDGSNKYYADSVKG |
| 675 | MPK20298-B9_SCFV huCCR8 HV hv_cdr3 | VYYGSGIYYKKNYYYGMDV |
| 676 | MPK20298-B9_SCFV huCCR8 LV lv_cdr1 | GGNNIGSKNVH |
| 677 | MPK20298-B9_SCFV huCCR8 LV lv_cdr2 | RDSNRPS |
| 678 | MPK20298-B9_SCFV huCCR8 LV lv_cdr3 | QVWDSSTVV |
| 679 | MPK20299-E2_SCFV huCCR8 HV hv_cdr1 | NNGMH |
| 680 | MPK20299-E2_SCFV huCCR8 HV hv_cdr2 | VISYDGSNKYYTDSVKG |
| 681 | MPK20299-E2_SCFV huCCR8 HV hv_cdr3 | VYYGSGIYYKKRYYYGMDV |
| 682 | MPK20299-E2_SCFV huCCR8 LV lv_cdr1 | EGNNIGSQNVH |
| 683 | MPK20299-E2_SCFV huCCR8 LV lv_cdr2 | RDSNRPS |
| 684 | MPK20299-E2_SCFV huCCR8 LV lv_cdr3 | QVWDGSAVV |
| 685 | MPK20299-D6_SCFV huCCR8 HV hv_cdr1 | SYGMH |
| 686 | MPK20299-D6_SCFV huCCR8 HV hv_cdr2 | VISYDGSNKYYADSVKG |
| 687 | MPK20299-D6_SCFV huCCR8 HV hv_cdr3 | VYYGSGIYYKKRYYYGMDV |
| 688 | MPK20299-D6_SCFV huCCR8 LV lv_cdr1 | EGNNIGSQNVH |
| 689 | MPK20299-D6_SCFV huCCR8 LV lv_cdr2 | RDSNRPS |
| 690 | MPK20299-D6_SCFV huCCR8 LV lv_cdr3 | QVWDGSAVV |
| 691 | MPK20299-A4_SCFV huCCR8 HV hv_cdr1 | NYGFH |
| 692 | MPK20299-A4_SCFV huCCR8 HV hv_cdr2 | VISYDGSNRYYADSVKG |
| 693 | MPK20299-A4_SCFV huCCR8 HV hv_cdr3 | VYYGSGTYYKNRYYYGMDV |
| 694 | MPK20299-A4_SCFV huCCR8 LV lv_cdr1 | GGHNIGSKGVH |
| 695 | MPK20299-A4_SCFV huCCR8 LV lv_cdr2 | RNSNRPS |
| 696 | MPK20299-A4_SCFV huCCR8 LV lv_cdr3 | QAWDSGTVV |
| 697 | MPK20300-G5_SCFV huCCR8 HV hv_cdr1 | NYGFH |
| 698 | MPK20300-G5_SCFV huCCR8 HV hv_cdr2 | VISYDGSNRYYADSVKG |
| 699 | MPK20300-G5_SCFV huCCR8 HV hv_cdr3 | VYYGSGTYYKNRYYYGMDV |
| 700 | MPK20300-G5_SCFV huCCR8 LV lv_cdrl | GANNIGSKNVH |
| 701 | MPK20300-G5_SCFV huCCR8 LV lv_cdr2 | RDFNRPS |
| 702 | MPK20300-G5_SCFV huCCR8 LV lv_cdr3 | QVWDSSTGNVV |
| 703 | MPK20299-C3_SCFV huCCR8 HV hv_cdr1 | NYGFH |
| 704 | MPK20299-C3_SCFV huCCR8 HV hv_cdr2 | VISYDGSNKYYADSVKG |
| 705 | MPK20299-C3_SCFV huCCR8 HV hv_cdr3 | VYYGSGSYYKNRYYYGMDV |
| 706 | MPK20299-C3_SCFV huCCR8 LV lv_cdr1 | GGNNIGSKNVH |
| 707 | MPK20299-C3_SCFV huCCR8 LV lv_cdr2 | RDSNRPS |
| 708 | MPK20299-C3_SCFV huCCR8 LV lv_cdr3 | QVWDSSTVV |
| 709 | MPK20299-B7_SCFV huCCR8 HV hv_cdr1 | NYGMH |
| 710 | MPK20299-B7_SCFV huCCR8 HV hv_cdr2 | VISYDGSNKYYADSVKG |
| 711 | MPK20299-B7_SCFV huCCR8 HV hv_cdr3 | VYYGSGIYYKKRYYYGMDV |
| 712 | MPK20299-B7_SCFV huCCR8 LV lv_cdr1 | GGNNIGSKNVH |
| 713 | MPK20299-B7_SCFV huCCR8 LV lv_cdr2 | RDSNRPS |
| 714 | MPK20299-B7_SCFV huCCR8 LV lv_cdr3 | QVWDSSSAHVI |
| 715 | MPK20299-A5_SCFV huCCR8 HV hv_cdr1 | GYGMH |
| 716 | MPK20299-A5_SCFV huCCR8 HV hv_cdr2 | VISYDGSNKYYADSVKG |
| 717 | MPK20299-A5_SCFV huCCR8 HV hv_cdr3 | VYYGSGIYYKNRYYYGMDV |
| 718 | MPK20299-A5_SCFV huCCR8 LV lv_cdr1 | GGNNLGSKNVH |
| 719 | MPK20299-A5_SCFV huCCR8 LV lv_cdr2 | RNSNRPS |
| 720 | MPK20299-A5_SCFV huCCR8 LV lv_cdr3 | QVWDSSTVV |
| 721 | MPK20299-D1_SCFV huCCR8 HV hv_cdr1 | NNGMH |
| 722 | MPK20299-D1_SCFV huCCR8 HV hv_cdr2 | VISYDGSNKYYADSVKG |
| 723 | MPK20299-D1_SCFV huCCR8 HV hv_cdr3 | VYYGSGIYYKNRYYYGMDV |
| 724 | MPK20299-D1_SCFV huCCR8 LV lv_cdr1 | GGNRIGSKNVH |
| 725 | MPK20299-D1_SCFV huCCR8 LV lv_cdr2 | RDSNRPS |
| 726 | MPK20299-D1_SCFV huCCR8 LV lv_cdr3 | QVWDSSTVV |
| 727 | MPK20299-C5_SCFV huCCR8 HV hv_cdr1 | NYGFH |
| 728 | MPK20299-C5_SCFV huCCR8 HV hv_cdr2 | VISYDGSNRYYADSVKG |
| 729 | MPK20299-C5_SCFV huCCR8 HV hv_cdr3 | VYYGSGTYYKNRYYYGMDV |
| 730 | MPK20299-C5_SCFV huCCR8 LV lv_cdr1 | GGHNIGSKGVH |
| 731 | MPK20299-C5_SCFV huCCR8 LV lv_cdr2 | RNSNRPS |
| 732 | MPK20299-C5_SCFV huCCR8 LV lv_cdr3 | QVWDSSTVV |
| 733 | MPK20299-B5_SCFV huCCR8 HV hv_cdr1 | NYGMH |
| 734 | MPK20299-B5_SCFV huCCR8 HV hv_cdr2 | VISYDGSNKYYADSVKG |
| 735 | MPK20299-B5_SCFV huCCR8 HV hv_cdr3 | VYYGSGIYYKNRYYYGMDV |
| 736 | MPK20299-B5_SCFV huCCR8 LV lv_cdr1 | GGHNIGSKGVH |
| 737 | MPK20299-B5_SCFV huCCR8 LV lv_cdr2 | RNSNRPS |
| 738 | MPK20299-B5_SCFV huCCR8 LV lv_cdr3 | QVWDSSTVV |
| 739 | MPK20299-G9_SCFV huCCR8 HV hv_cdr1 | NNGMH |
| 740 | MPK20299-G9_SCFV huCCR8 HV hv_cdr2 | VISNDGSNKYYADSVRG |
| 741 | MPK20299-G9_SCFV huCCR8 HV hv_cdr3 | VYYGSGIYYKNRYYYGMDV |
| 742 | MPK20299-G9_SCFV huCCR8 LV lv_cdr1 | GGNNIGSKNVH |
| 743 | MPK20299-G9_SCFV huCCR8 LV lv_cdr2 | RNSNRPS |
| 744 | MPK20299-G9_SCFV huCCR8 LV lv_cdr3 | QVWDSSTVV |
| 745 | MPK20299-G5_SCFV huCCR8 HV hv_cdr1 | NNGMH |
| 746 | MPK20299-G5_SCFV huCCR8 HV hv_cdr2 | VISNDGSNKYYADSVRG |
| 747 | MPK20299-G5_SCFV huCCR8 HV hv_cdr3 | VYYGSGIYYKNRYYYGMDV |
| 748 | MPK20299-G5_SCFV huCCR8 LV lv_cdr1 | EGNNIGSKNVH |
| 749 | MPK20299-G5_SCFV huCCR8 LV lv_cdr2 | RDSNRPS |
| 750 | MPK20299-G5_SCFV huCCR8 LV lv_cdr3 | QVWDSSAVV |
| 751 | MPK20298-C10_SCFV huCCR8 HV | SSGMH |
| | hv_cdr1 | |
| 752 | MPK20298-C10_SCFV huCCR8 HV | VISNDGSNKYYADSVKG |
| | hv_cdr2 | |
| 753 | MPK20298-C10_SCFV huCCR8 HV | VYYGSGIYYKNNYYYGMDV |
| | hv_cdr3 | |
| 754 | MPK20298-C10_SCFV huCCR8 LV lv_cdr1 | GGNNIGSKNVH |
| 755 | MPK20298-C10_SCFV huCCR8 LV lv_cdr2 | RNSNRPS |
| 756 | MPK20298-C10_SCFV huCCR8 LV lv_cdr3 | QAWDSSTVV |
| 757 | MPK20298-B5_SCFV huCCR8 HV hv_cdr1 | NYGMH |
| 758 | MPK20298-B5_SCFV huCCR8 HV hv_cdr2 | VISYDGSNKYYADSVKG |
| 759 | MPK20298-B5_SCFV huCCR8 HV hv_cdr3 | VYYGSGIYYKKRYYYGMDV |
| 760 | MPK20298-B5_SCFV huCCR8 LV lv_cdr1 | GGNNIGSQNVH |
| 761 | MPK20298-B5_SCFV huCCR8 LV lv_cdr2 | RDSNRPS |
| 762 | MPK20298-B5_SCFV huCCR8 LV lv_cdr3 | QVWDSSAVV |
| 763 | MPK20299-F2_SCFV huCCR8 HV hv_cdr1 | SSGMH |
| 764 | MPK20299-F2_SCFV huCCR8 HV hv_cdr2 | VISNDGSNKYYADSVKG |
| 765 | MPK20299-F2_SCFV huCCR8 HV hv_cdr3 | VYYGSGIYYKNRYYYGMDV |
| 766 | MPK20299-F2_SCFV huCCR8 LV lv_cdr1 | GGNNIGSKNVH |
| 767 | MPK20299-F2_SCFV huCCR8 LV lv_cdr2 | RDSNRPS |
| 768 | MPK20299-F2_SCFV huCCR8 LV lv_cdr3 | QAWDSGTVV |
| 769 | MPK20298-D4_SCFV huCCR8 HV hv_cdr1 | NYGMH |
| 770 | MPK20298-D4_SCFV huCCR8 HV hv_cdr2 | VISYDGSNKYYADSVKG |
| 771 | MPK20298-D4_SCFV huCCR8 HV hv_cdr3 | VYYGSGIYYKKRYYYGMDV |
| 772 | MPK20298-D4_SCFV huCCR8 LV lv_cdr1 | GGNNIGGKNVH |
| 773 | MPK20298-D4_SCFV huCCR8 LV lv_cdr2 | RDSNRPS |
| 774 | MPK20298-D4_SCFV huCCR8 LV lv_cdr3 | QVWDSSTVV |
| 775 | MPK20297-F5_SCFV huCCR8 HV hv_cdr1 | RNGMH |
| 776 | MPK20297-F5_SCFV huCCR8 HV hv_cdr2 | VISNDGSNKYYADSVKG |
| 777 | MPK20297-F5_SCFV huCCR8 HV hv_cdr3 | VYYGSGIYYKNNYYYGMDV |
| 778 | MPK20297-F5_SCFV huCCR8 LV lv_cdr1 | GGNNIGSKNVH |
| 779 | MPK20297-F5_SCFV huCCR8 LV lv_cdr2 | RNSNRPS |
| 780 | MPK20297-F5_SCFV huCCR8 LV lv_cdr3 | QVWDSSTVV |
| 781 | MPK20299-D9_SCFV huCCR8 HV hv_cdr1 | RNGMH |
| 782 | MPK20299-D9_SCFV huCCR8 HV hv_cdr2 | VISNDGSNKYYADSVKG |
| 783 | MPK20299-D9_SCFV huCCR8 HV hv_cdr3 | VYYGSGIYYKNNYYYGMDV |
| 784 | MPK20299-D9_SCFV huCCR8 LV lv_cdr1 | GGNNIESKNVH |
| 785 | MPK20299-D9_SCFV huCCR8 LV lv_cdr2 | RDSNRPS |
| 786 | MPK20299-D9_SCFV huCCR8 LV lv_cdr3 | QVWDSSTVV |
| 787 | huCCR8_32360_huIgG1z | NARMG |
| | mAb(LC: K38R) HC huCCR8 HV hv_cdr1 | |
| 788 | huCCR8_32360_huIgG1z | RIKSKTEGGTRDYAAPVKG |
| | mAb(LC: K38R) HC huCCR8 HV hv_cdr2 | |
| 789 | huCCR8_32360_huIgG1z | YSGV |
| | mAb(LC: K38R) HC huCCR8 HV hv_cdr3 | |
| 790 | huCCR8_32360_huIgG1z | KSSQSVLYSSNNRNYLA |
| | mAb(LC: K38R) LC huCCR8 LV lv_cdr1 | |
| 791 | huCCR8_32360_huIgG1z | WASTRES |
| | mAb(LC: K38R) LC huCCR8 LV lv_cdr2 | |
| 792 | huCCR8_32360_huIgG1z | QQYYSIPIT |
| | mAb(LC: K38R) LC huCCR8 LV lv_cdr3 | |
| 793 | anti- | NYGFH |
| | huCCR8_44379(VH: D72S, VL: N67A_S68A_ | |
| | M99G_W109F_S111A)_huIgG1z (mAb) HC | |
| | huCCR8 HV hv_cdr1 | |
| 794 | anti- | VISYDGSNRYYASSVKG |
| | huCCR8_44379(VH: D72S, VL: N67A_S68A_ | |
| | M99G_W109F_S111A)_huIgG1z (mAb)_HC | |
| | huCCR8 HV hv_cdr2 | |
| 795 | anti- | VYYGSGTYYKNRYYYGMDV |
| | huCCR8_44379(VH: D72S,VL: N67A_S68A_ | |
| | M99G_W109F_S111A)_huIgG1z (mAb)_HC | |
| | huCCR8 HV hv_cdr3 | |
| 796 | anti- | GGHNIGSKGVH |
| | huCCR8_44379(VH: D72S, VL: N67A_S68A_ | |
| | M99G_W109F_S111A) huIgG1z (mAb)_LC | |
| | huCCR8 LV lv_cdr1 | |
| 797 | anti- | RAANRPS |
| | huCCR8_44379(VH: D72S, VL: N67A_S68A_ | |
| | M99G_W109F_S111A)_huIgG1z (mAb)_LC | |
| | huCCR8 LV lv_cdr2 | |
| 798 | anti- | QAFDAGTVV |
| | huCCR8 44379(VH: D72S, VL: N67A_S68A_ | |
| | M99G_W109F_S111A)_huIgG1z (mAb)_LC | |
| | huCCR8 LV lv_cdr3 | |
| 799 | anti- | NYGFH |
| | huCCR8_44379(VH: D61A_D72A, VL: N67Q_ | |
| | M99E_W109F_S111A)_huIgG1z | |
| | (mAb) HC huCCR8 HV hv_cdr1 | |
| 800 | anti- | VISYAGSNRYYAASVKG |
| | huCCR8_44379(VH: D61A_D72A, VL: N67Q_ | |
| | M99E_W109F_S111A)_huIgG1z | |
| | (mAb) HC huCCR8 HV hv_cdr2 | |
| 801 | anti- | VYYGSGTYYKNRYYYGMDV |
| | huCCR8_44379(VH: D61A_D72A, VL: N67Q_ | |
| | M99E_W109F_S111A)_huIgG1z | |
| | (mAb) HC huCCR8 HV hv_cdr3 | |
| 802 | anti- | GGHNIGSKGVH |
| | huCCR8_44379(VH: D61A_D72A, VL: N67Q_ | |
| | M99E_W109F_S111A) huIgG1z | |
| | (mAb) LC huCCR8 LV lv_cdr1 | |
| 803 | anti- | RQSNRPS |
| | huCCR8_44379(VH: D61A_D72A, VL: N67Q_ | |
| | M99E_W109F_S111A)_huIgG1z | |
| | (mAb) LC huCCR8 LV lv_cdr2 | |
| 804 | anti- | QAFDAGTVV |
| | huCCR8_44379(VH: D61A_D72A, VL: N67Q_ | |
| | M99E_W109F_S111A)_huIgG1z | |
| | (mAb) LC huCCR8 LV lv_cdr3 | |
| 805 | anti- | NYGFH |
| | huCCR8_44379(VH: D61S, VL: N67Q_M99G | |
| | _W109F_S111A)_huIgG1z (mAb)_HC | |
| | huCCR8 HV hv_cdr1 | |
| 806 | anti- | VISYSGSNRYYADSVKG |
| | huCCR8_44379(VH: D61S, VL: N67Q_M99G | |
| | _W109F_S111A) huIgG1z (mAb)_HC | |
| | huCCR8 HV hv_cdr2 | |
| 807 | anti- | VYYGSGTYYKNRYYYGMDV |
| | huCCR8_44379(VH: D61S,VL: N67Q_M99G | |
| | _W109F_S111A)_huIgG1z (mAb)_HC | |
| | huCCR8 HV hv_cdr3 | |
| 808 | anti- | GGHNIGSKGVH |
| | huCCR8_44379(VH: D61S,VL: N67Q_M99G | |
| | _W109F_S111A)_huIgG1z (mAb)_LC | |
| | huCCR8 LV lv_cdr1 | |
| 809 | anti- | RQSNRPS |
| | huCCR8_44379(VH: D61S, VL: N67Q_M99G | |
| | _W109F_S111A)_huIgG1z (mAb)_LC | |
| | huCCR8 LV lv_cdr2 | |
| 810 | anti- | QAFDAGTVV |
| | huCCR8_44379(VH: D61S,VL: N67Q_M99G | |
| | _W109F_S111A)_huIgG1z (mAb)_LC | |
| | huCCR8 LV lv_cdr3 | |
| 811 | Hu anti-huCCR8 LIBC315615-1 HuIgG1z | GGHNIGSKGVH |
| | mAb_LC huCCR8 LV lv_cdr1 | |
| 812 | Hu anti-huCCR8 LIBC315615-1 HuIgG1z | RNSNRPS |
| | mAb_LC huCCR8 LV lv_cdr2 | |
| 813 | Hu anti-huCCR8 LIBC315615-1 HuIgG1z | QVWDISTVV |
| | mAb_LC huCCR8 LV lv_cdr3 | |
| 814 | Hu anti-huCCR8 LIBC315615-1 HuIgG1z | NCGMH |
| | mAb_HC huCCR8 HV hv_cdr1 | |
| 815 | Hu anti-huCCR8 LIBC315615-1 HuIgG1z | VISYDGGNKYHADSVKG |
| | mAb_HC huCCR8 HV hv_cdr2 | |
| 816 | Hu anti-huCCR8 LIBC315615-1 HuIgG1z | VYYGSGIYYKNRYYYGMDV |
| | mAb_HC huCCR8 HV hv_cdr3 | |
| 817 | Hu anti-huCCR8 LIBC317152-1 HuIgG1z | GGHNIGSKGVH |
| | mAb_LC huCCR8 LV lv_cdr1 | |
| 818 | Hu anti-huCCR8 LIBC317152-1 HuIgG1z | RNSNRPS |
| | mAb_LC huCCR8 LV lv_cdr2 | |
| 819 | Hu anti-huCCR8 LIBC317152-1 HuIgG1z | QVWDSSTVV |
| | mAb_LC huCCR8 LV lv_cdr3 | |
| 820 | Hu anti-huCCR8 LIBC317152-1 HuIgG1z | NCGMH |
| | mAb_HC huCCR8 HV hv_cdrl | |
| 821 | Hu anti-huCCR8 LIBC317152-1 HuIgG1z | VISYDGGNKYYADSVKG |
| | mAb_HC huCCR8 HV hv_cdr2 | |
| 822 | Hu anti-huCCR8 LIBC317152-1 HuIgG1z | VYYGSGIYYKNRYYYGMDV |
| | mAb_HC huCCR8 HV hv_cdr3 | |
| 823 | Hu anti-huCCR8 LIBC317471-1 HuIgG1z | GGNNIGSKNVH |
| | mAb_LC huCCR8 LV lv_cdrl | |
| 824 | Hu anti-huCCR8 LIBC317471-1 HuIgG1z | RDSNRPS |
| | mAb_LC huCCR8 LV lv_cdr2 | |
| 825 | Hu anti-huCCR8 LIBC317471-1 HuIgG1z | QVWDSNTVV |
| | mAb_LC huCCR8 LV lv_cdr3 | |
| 826 | Hu anti-huCCR8 LIBC317471-1 HuIgG1z | NNGMH |
| | mAb_HC huCCR8 HV hv_cdr1 | |
| 827 | Hu anti-huCCR8 LIBC317471-1 HuIgG1z | VISNDGSNKYYADSVRG |
| | mAb_HC huCCR8 HV hv_cdr2 | |
| 828 | Hu anti-huCCR8 LIBC317471-1 HuIgG1z | VYYGSGIYYKNNYYYGMDV |
| | mAb_HC huCCR8 HV hv_cdr3 | |
| 829 | Hu anti-huCCR8 LIBC317977-1 HuIgG1z | GGNNIGSKNVH |
| | mAb_LC huCCR8 LV lv_cdr1 | |
| 830 | Hu anti-huCCR8 LIBC317977-1 HuIgG1z | RNSNRPS |
| | mAb_LC huCCR8 LV lv_cdr2 | |
| 831 | Hu anti-huCCR8 LIBC317977-1 HuIgG1z | QVWDSSTVV |
| | mAb_LC huCCR8 LV lv_cdr3 | |
| 832 | Hu anti-huCCR8 LIBC317977-1 HuIgG1z | TYGMH |
| | mAb_HC huCCR8 HV hv_cdr1 | |
| 833 | Hu anti-huCCR8 LIBC317977-1 HuIgG1z | VISYDGSNKYYADSVKG |
| | mAb_HC huCCR8 HV hv_cdr2 | |
| 834 | Hu anti-huCCR8 LIBC317977-1 HuIgG1z | VYYGSGSYYKKNYYYGMDV |
| | mAb_HC huCCR8 HV hv_cdr3 | |
| 835 | Hu anti-huCCR8 LIBC318774-1 HuIgG1z | GGNNIGGKNVH |
| | mAb_LC huCCR8 LV lv_cdr1 | |
| 836 | Hu anti-huCCR8 LIBC318774-1 HuIgG1z | RDSNRPS |
| | mAb_LC huCCR8 LV lv_cdr2 | |
| 837 | Hu anti-huCCR8 LIBC318774-1 HuIgG1z | QVWDSSTVV |
| | mAb_LC huCCR8 LV lv_cdr3 | |
| 838 | Hu anti-huCCR8 LIBC318774-1 HuIgG1z | SYGFH |
| | mAb_HC huCCR8 HV hv_cdr1 | |
| 839 | Hu anti-huCCR8 LIBC318774-1 HuIgG1z | VISYDGSNKYYADSVKG |
| | mAb_HC huCCR8 HV hv_cdr2 | |
| 840 | Hu anti-huCCR8 LIBC318774-1 HuIgG1z | VYYGSGTYYKNRYYYGMDV |
| | mAb_HC huCCR8 HV hv_cdr3 | |
| 841 | Hu anti-huCCR8 LIBC319840-1 HuIgG1z | GGNNIGSKNVH |
| | mAb_LC huCCR8 LV lv_cdr1 | |
| 842 | Hu anti-huCCR8 LIBC319840-1 HuIgG1z | RDSNRPS |
| | mAb_LC huCCR8 LV lv_cdr2 | |
| 843 | Hu anti-huCCR8 LIBC319840-1 HuIgG1z | QVWDSSTVV |
| | mAb_LC huCCR8 LV lv_cdr3 | |
| 844 | Hu anti-huCCR8 LIBC319840-1 HuIgG1z | NNGMH |
| | mAb_HC huCCR8 HV hv_cdr1 | |
| 845 | Hu anti-huCCR8 LIBC319840-1 HuIgG1z | VISNDGSNKYYPDSVKG |
| | mAb_HC huCCR8 HV hv_cdr2 | |
| 846 | Hu anti-huCCR8 LIBC319840-1 HuIgG1z | VYYGSGNYYKNNYYYGMDV |
| | mAb_HC huCCR8 HV hv_cdr3 | |
| 847 | Hu anti-huCCR8 LIBC320212-1 HuIgG1z | EGNNIGSQNVH |
| | mAb_LC huCCR8 LV lv_cdr1 | |
| 848 | Hu anti-huCCR8 LIBC320212-1 HuIgG1z | RDSNRPS |
| | mAb_LC huCCR8 LV lv_cdr2 | |
| 849 | Hu anti-huCCR8 LIBC320212-1 HuIgG1z | QVWDGSAVV |
| | mAb_LC huCCR8 LV lv_cdr3 | |
| 850 | Hu anti-huCCR8 LIBC320212-1 HuIgG1z | SSGMH |
| | mAb_HC huCCR8 HV hv_cdr1 | |
| 851 | Hu anti-huCCR8 LIBC320212-1 HuIgG1z | VISHDGSNKYYADSVKG |
| | mAb_HC huCCR8 HV hv_cdr2 | |
| 852 | Hu anti-huCCR8 LIBC320212-1 HuIgG1z | VYYGSGIYYKNRYYYGMDV |
| | mAb_HC huCCR8 HV hv_cdr3 | |
| 853 | Hu anti-huCCR8 LIBC320384-1 HuIgG1z | GGHNIGSKGVH |
| | mAb_LC huCCR8 LV lv_cdr1 | |
| 854 | Hu anti-huCCR8 LIBC320384-1 HuIgG1z | RNSNRPS |
| | mAb_LC huCCR8 LV lv_cdr2 | |
| 855 | Hu anti-huCCR8 LIBC320384-1 HuIgG1z | QVWDSSTVV |
| | mAb_LC huCCR8 LV lv_cdr3 | |
| 856 | Hu anti-huCCR8 LIBC320384-1 HuIgG1z | DCGMH |
| | mAb_HC huCCR8 HV hv_cdr1 | |
| 857 | Hu anti-huCCR8 LIBC320384-1 HuIgG1z | VISYDGGNKYYADSVKG |
| | mAb_HC huCCR8 HV hv_cdr2 | |
| 858 | Hu anti-huCCR8 LIBC320384-1 HuIgG1z | VYYGSGIYYKNRYYYGMDV |
| | mAb_HC huCCR8 HV hv_cdr3 | |
| 859 | Hu anti-huCCR8 LIBC320689-1 HuIgG1z | GGNNIGSKNVH |
| | mAb_LC huCCR8 LV lv_cdr1 | |
| 860 | Hu anti-huCCR8 LIBC320689-1 HuIgG1z | RSSNRPS |
| | mAb_LC huCCR8 LV lv_cdr2 | |
| 861 | Hu anti-huCCR8 LIBC320689-1 HuIgG1z | QIWDSSTVV |
| | mAb_LC huCCR8 LV lv_cdr3 | |
| 862 | Hu anti-huCCR8 LIBC320689-1 HuIgG1z | SYGMH |
| | mAb_HC huCCR8 HV hv_cdr1 | |
| 863 | Hu anti-huCCR8 LIBC320689-1 HuIgG1z | VISFDGNNKYYADSVKG |
| | mAb_HC huCCR8 HV hv_cdr2 | |
| 864 | Hu anti-huCCR8 LIBC320689-1 HuIgG1z | VYYGSGSYYKNRYYYGMDV |
| | mAb_HC huCCR8 HV hv_cdr3 | |
| 865 | Hu anti-huCCR8 LIBC321408-1 HuIgG1z | GGNNIGSKNVH |
| | mAb_LC huCCR8 LV lv_cdr1 | |
| 866 | Hu anti-huCCR8 LIBC321408-1 HuIgG1z | RDSNRPS |
| | mAb_LC huCCR8 LV lv_cdr2 | |
| 867 | Hu anti-huCCR8 LIBC321408-1 HuIgG1z | QVWDSSTVV |
| | mAb_LC huCCR8 LV lv_cdr3 | |
| 868 | Hu anti-huCCR8 LIBC321408-1 HuIgG1z | SNGMH |
| | mAb_HC huCCR8 HV hv_cdr1 | |
| 869 | Hu anti-huCCR8 LIBC321408-1 HuIgG1z | VISNDGSNKYYGDSVKG |
| | mAb_HC huCCR8 HV hv_cdr2 | |
| 870 | Hu anti-huCCR8 LIBC321408-1 HuIgG1z | VYYGSGIYYRNNYYYGMDV |
| | mAb_HC huCCR8 HV hv_cdr3 | |
| 871 | Hu anti-huCCR8 LIBC321824-1 HuIgG1z | GGNNIGSKNVH |
| | mAb_LC huCCR8 LV lv_cdr1 | |
| 872 | Hu anti-huCCR8 LIBC321824-1 HuIgG1z | RNTNRPS |
| | mAb_LC huCCR8 LV lv_cdr2 | |
| 873 | Hu anti-huCCR8 LIBC321824-1 HuIgG1z | QVWDSSTVV |
| | mAb_LC huCCR8 LV lv_cdr3 | |
| 874 | Hu anti-huCCR8 LIBC321824-1 HuIgG1z | GYGMH |
| | mAb_HC huCCR8 HV hv_cdr1 | |
| 875 | Hu anti-huCCR8 LIBC321824-1 HuIgG1z | VISYDGSNKYYADSVKG |
| | mAb_HC huCCR8 HV hv_cdr2 | |
| 876 | Hu anti-huCCR8 LIBC321824-1 HuIgG1z | VYYGSGIYYKNRYYYGMDV |
| | mAb_HC huCCR8 HV hv_cdr3 | |
| 877 | Hu anti-huCCR8 LIBC321845-1 HuIgG1z | GGNNIGSKNVH |
| | mAb_LC huCCR8 LV lv_cdr1 | |
| 878 | Hu anti-huCCR8 LIBC321845-1 HuIgG1z | RNTNRPS |
| | mAb_LC huCCR8 LV lv_cdr2 | |
| 879 | Hu anti-huCCR8 LIBC321845-1 HuIgG1z | QVWDSSTVV |
| | mAb_LC huCCR8 LV lv_cdr3 | |
| 880 | Hu anti-huCCR8 LIBC321845-1 HuIgG1z | GYGMH |
| | mAb_HC huCCR8 HV hv_cdr1 | |
| 881 | Hu anti-huCCR8 LIBC321845-1 HuIgG1z | VISYDGSNKYYADSVKG |
| | mAb_HC huCCR8 HV hv_cdr2 | |
| 882 | Hu anti-huCCR8 LIBC321845-1 HuIgG1z | VYYGSGIYYKNRYYYGMDV |
| | mAb_HC huCCR8 HV hv_cdr3 | |
| 883 | Hu anti-huCCR8 LIBC322176-1 HuIgG1z | GGNNIGDKNVH |
| | mAb_LC huCCR8 LV lv_cdr1 | |
| 884 | Hu anti-huCCR8 LIBC322176-1 HuIgG1z | RNNVRPS |
| | mAb_LC huCCR8 LV lv_cdr2 | |
| 885 | Hu anti-huCCR8 LIBC322176-1 HuIgG1z | QVWDSSTVV |
| | mAb_LC huCCR8 LV lv_cdr3 | |
| 886 | Hu anti-huCCR8 LIBC322176-1 HuIgG1z | NFGMH |
| | mAb_HC huCCR8 HV hv_cdr1 | |
| 887 | Hu anti-huCCR8 LIBC322176-1 HuIgG1z | VISYDGGNKYYADSVKG |
| | mAb_HC huCCR8 HV hv_cdr2 | |
| 888 | Hu anti-huCCR8 LIBC322176-1 HuIgG1z | VYYGSGSYYKKRYYYGMDV |
| | mAb_HC huCCR8 HV hv_cdr3 | |
| 889 | Hu anti-huCCR8 LIBC323412-1 HuIgG1z | GGNNIGSKNVH |
| | mAb_LC huCCR8 LV lv_cdr1 | |
| 890 | Hu anti-huCCR8 LIBC323412-1 HuIgG1z | RDSNRPS |
| | mAb_LC huCCR8 LV lv_cdr2 | |
| 891 | Hu anti-huCCR8 LIBC323412-1 HuIgG1z | QVWDSSTVV |
| | mAb_LC huCCR8 LV lv_cdr3 | |
| 892 | Hu anti-huCCR8 LIBC323412-1 HuIgG1z | SCGMH |
| | mAb_HC huCCR8 HV hv_cdr1 | |
| 893 | Hu anti-huCCR8 LIBC323412-1 HuIgG1z | VISYDGTNKYYADSVKG |
| | mAb_HC huCCR8 HV hv_cdr2 | |
| 894 | Hu anti-huCCR8 LIBC323412-1 HuIgG1z | VYYGSGIYYKKNYYYGMDV |
| | mAb_HC huCCR8 HV hv_cdr3 | |
| 895 | huCCR8_32360_huIgG1z mAb_HC huCCR8 | NARMG |
| | HV hv_cdr1 | |
| 896 | huCCR8_32360_huIgG1z mAb_HC huCCR8 | RIKSKTEGGTRDYAAPVKG |
| | HV hv_cdr2 | |
| 897 | huCCR8_32360_huIgG1z mAb_HC huCCR8 | YSGV |
| | HV hv_cdr3 | |
| 898 | huCCR8_32360_huIgG1z mAb_LC huCCR8 | KSSQSVLYSSNNKNYLA |
| | LV lv_cdr1 | |
| 899 | huCCR8 32360_huIgG1z mAb_LC huCCR8 | WASTRES |
| | LV lv_cdr2 | |
| 900 | huCCR8 32360_huIgG1z mAb_LC huCCR8 | QQYYSIPIT |
| | LV lv_cdr3 | |
| 901 | MPK20298-A4_SCFV HV huCCR8 | QVQLVESGGGVVQPGRSLRLSCVVS |
| | | GFNFSNNGMHWVRQAPGKGLEWVA |
| | | VISNDGSNKYYADSVKGRFTISRDNS |
| | | KNTLYLQMNSLRTEDTAVYYCAKV |
| | | YYGSGIYYKNRNYYGMDVWGQGTT |
| | | VTVSS |
| 902 | MPK20298-A4_SCFV LV huCCR8 | SYELTQPPSVSVALGQTARITCGGNN |
| | | IGSQNVHWYQQKPGQAPVLVIYRDS |
| | | NRPSGIPDRFSGSKSGNTATLTISRAQ |
| | | AGDEADYYCQVWDSSTVVFGGGTK |
| | | LTVL |
| 903 | MPK20299-D2_SCFV HV huCCR8 | QVQLVESGGGVVQPGRSLRLSCAAS |
| | | GFNFSNYGMHWVRQAPGKGLEWVA |
| | | VISYDGSNKYYADSVKGRFTISRDNS |
| | | KNTLYLQMNSLRAEDTAVYFCARVY |
| | | YGSGIYYKKRYYYGMDVWGQGTTV |
| | | TVSS |
| 904 | MPK20299-D2_SCFV LV huCCR8 | SYELTQPPSVSVALGQTARITCGGHN |
| | | IGSKGVHWYQQKPGQAPVLVIYRNS |
| | | NRPSGIPERFSGSNSGNTATLTITRAQ |
| | | AGDEADYYCQVWDSSTVVFGGGTK |
| | | LTVL |
| 905 | MPK20299-F11_SCFV HV huCCR8 | QVQLVESGGGVVQPGRSLRLSCAPS |
| | | GFNFSNYGMHWVRQAPGKGLEWVA |
| | | VISYDGSNKYYADSVKGRFTISRDNS |
| | | KNTLFLQMNSLRAEDTAVYFCARVY |
| | | YGSGSYYKKRYYYGMDVWGQGTT |
| | | VTVSS |
| 906 | MPK20299-F11_SCFV LV huCCR8 | SYELTQPPSVSVALGQTARITCGGNN |
| | | IGSQNVHWYQQKPGQAPVLVIYRDS |
| | | NRPSGIPERFSGSKSGNTATLTISRAQ |
| | | AGDEADYYCQVWDSSTVVFGGGTQ |
| | | LTVL |
| 907 | MPK20298-H6_SCFV HV huCCR8 | QVQLVESGGGVVQPGRSLRLSCAAS |
| | | GFTFSSSGMHWVRQAPGKGLEWVA |
| | | VISYDGTNKYYADSVKGRFTISRDNS |
| | | KNTLYLQMNSLRAEDTAVYYCAKV |
| | | YYGSGIYYKNRYYYGMDVWGQGTT |
| | | VTVSS |
| 908 | MPK20298-H6_SCFV LV huCCR8 | SYELTQPPSVSVALGQTARITCGGHN |
| | | IGSKGVHWYQQKPGQAPVLVIYRNS |
| | | NRPSGIPERFSGSNSGNTATLTISRAQ |
| | | AGDEADYYCQVWDSSTVVFGGGTQ |
| | | LTVL |
| 909 | MPK20297-A4_SCFV HV huCCR8 | QVQLVESGGGVVQPGRSLRLSCAVS |
| | | GFNFSNYGMHWVRQVPGRGLDWVA |
| | | VISNDGSNKYYADSVKGRFTISRDNS |
| | | KNTLYLQMDSLRTEDTAVYYCAKV |
| | | YYGSGIYYKKRYYYGMDVWGQGTT |
| | | VTVSS |
| 910 | MPK20297-A4_SCFV LV huCCR8 | SYELTQPPSVSVALGQTARITCGGHN |
| | | IGSQNVHWYQQKPGQAPVLVIYRDS |
| | | NRPSGIPERFSGSKSGNTATLTISRAQ |
| | | AGDEADYYCQVWDSSTVVFGGGTQ |
| | | LTVL |
| 911 | MPK20299-H8_SCFV HV huCCR8 | QVQLVESGGGVVQPGRSLRLSCAAS |
| | | GFNFSNYGMHWVRQAPGKGLEWVA |
| | | VISYDGSNKYYADSVKGRFTISRDNS |
| | | KNTLYLQMNSLRAEDTAVYFCARVY |
| | | YGSGIYYKKRYYYGMDVWGQGTTV |
| | | TVSS |
| 912 | MPK20299-H8_SCFV LV huCCR8 | SYELTQPPSVSVAPGQTARITCGGNNI |
| | | GSKNVHWYQQKAGQAPVQVIYRNS |
| | | NRPSGIPARFSGSNSGNTATLTISRAQ |
| | | AGDEADYYCQVWDSSTVVFGGGTK |
| | | LTVL |
| 913 | MPK20300-C11_SCFV HV huCCR8 | QVQLVESGGGVVQPGRSLRLSCAAS |
| | | GFTFSSYGMHWVRQAPGKGLEWVA |
| | | VISYDGSNKYYADSVKGRFTISRDNS |
| | | KNTLYLQMNSLRGEDTAVYYCARV |
| | | YYGSGSYYKNRYYYGMDVWGQGT |
| | | TVTVSS |
| 914 | MPK20300-C11_SCFV LV huCCR8 | SYELTQPPSVSVAPGQTARIPCGGNNI |
| | | GSKNVHWYQQKPGQAPVLVIYRDIN |
| | | RPSGIPERFSGSNSGNTATLTISRAQA |
| | | GDEADYYCQVWDSSVVFGGGTKLT |
| | | VL |
| 915 | MPK20298-B1_SCFV HV huCCR8 | QVQLVESGGGVVQPGRSLRLSCAAS |
| | | GFNFSNYGMHWVRQAPGKGLEWVA |
| | | VISYDGSNKYYADSVKGRFTISRDNS |
| | | KNTLYLQMNSLRAEDTAVYFCARVY |
| | | YGSGIYYKKRYYYGMDVWGQGTTV |
| | | TVSS |
| 916 | MPK20298-B1_SCFV LV huCCR8 | SYELTQPPSVSVALGQTARLTCEGNN |
| | | IGSKNVHWYQQKPGQAPVLVIYRNS |
| | | NRPSGIPERFSGSNSGNTATLTISRVQ |
| | | AGDEADYYCQAWDSSTVVFGGGTQ |
| | | LTVL |
| 917 | MPK20297-E5_SCFV HV huCCR8 | QVQLVESGGGLVKPGGSLRLSCAVS |
| | | GFNFSNNGMHWVRQAPGKGLEWVA |
| | | VISYDGSNKYYTDSVKGRFTISRDNS |
| | | KNTLYLQMNSLRTEDTAVYYCAKV |
| | | YYGSGIYYKKRYYYGMDVWGQGTT |
| | | VTVSS |
| 918 | MPK20297-E5_SCFV LV huCCR8 | SYELTQPLSVSEALGQTARITCGGNNI |
| | | GSKNVHWYQQKPGQAPVLVIYRDSN |
| | | RPSGIPERFSGSNSGNAATLTISRVEA |
| | | GDEADYYCQVWDSSSDHVVFGGGT |
| | | QLTVL |
| 919 | MPK20299-A3_SCFV HV huCCR8 | QVQLVESGGGVVQPGRSLRLSCAAS |
| | | GFNFSNYGMHWVRQAPGKGLEWVA |
| | | VISYDGSNKYYADSVKGRFTISRDNS |
| | | KNTLYLQMNSLRAEDTAVYFCARVY |
| | | YGSGIYYKKRYYYGMDVWGQGTTV |
| | | TVSS |
| 920 | MPK20299-A3_SCFV LV huCCR8 | SYELTQPPSVSVAPGQTARITCGGNNI |
| | | GSKNVHWYQQKPGQAPVLVIYRNSN |
| | | RPSGIPERFSGSNSGNTATLTISGTQA |
| | | MDEADYYCQAWDSSNVVFGGGTQL |
| | | TVL |
| 921 | MPK20297-B4_SCFV HV huCCR8 | QVQLVESGGGVVQPGRSLRLSCVVS |
| | | GFNFSRNGMHWVRQVPGRGLDWVA |
| | | VISNDGSNKYYADSVKGRFTISRDNS |
| | | KNTLYLQMNSLRAEDTAVYYCAKV |
| | | YYGSGIYYKNNYYYGMDVWGQGTT |
| | | VTVSS |
| 922 | MPK20297-B4_SCFV LV huCCR8 | SYELTQPLSVSVALGQTARITCGGNN |
| | | IGSQNVHWYQQKPGQAPVLVIYRDS |
| | | NRPSGIPDRFSGSKSGNTATLTISRAQ |
| | | AGDEADYYCQVWDSSTVVFGGGTQ |
| | | LTVL |
| 923 | MPK20298-F6_SCFV HV huCCR8 | QVQLVESGGGVVQPGRSLRLSCVVS |
| | | GFNFSRNGMHWVRQVPGRGLDWVA |
| | | VISNDGSNKYYADSVKGRFTISRDNS |
| | | KNTLYLQMNSLRAEDTAVYYCAKV |
| | | YYGSGIYYKNRYYYGMDVWGQGTT |
| | | VTVSS |
| 924 | MPK20298-F6_SCFV LV huCCR8 | SYELTQPPSVSVAPGQTARITCGGNNI |
| | | GSKNVHWYQQKPGQAPVLVIYRDSN |
| | | RPSGIPERFSGSKSGTTATLTISRAQA |
| | | GDEAEYYCQVWDSSTVVFGGGTELT |
| | | VL |
| 925 | MPK20299-H3_SCFV HV huCCR8 | QVQLVESGGGVVQPGRSLRLSCAAS |
| | | GFNFSNYGMHWVRQAPGKGLEWVA |
| | | VISYDGSNKYYADSVKGRFTISRDNS |
| | | KNTLYLQMNSLRAEDTAVYFCARVY |
| | | YGSGIYYKKRYYYGMDVWGQGTTV |
| | | TVSS |
| 926 | MPK20299-H3_SCFV LV huCCR8 | SYELTQPLSVSVALGQTARITCGGNN |
| | | IGSKNVHWYQQKPGQAPVLAIYRNS |
| | | NRPSGIPERFTGSNSGNTATLTISRAQ |
| | | AGDESDYYCQIWDSSTVVFGGGTKL |
| | | TVL |
| 927 | MPK20298-B9_SCFV HV huCCR8 | QVQLVESGGGVVQPGRSLRLSCAAS |
| | | GFNFSRNGMHWVRQVPGRGLDWVA |
| | | VISNDGSNKYYADSVKGRFTISRDNS |
| | | KNTLYLQMNSLRAEDTAVYYCAKV |
| | | YYGSGIYYKKNYYYGMDVWGQGTT |
| | | VTVSS |
| 928 | MPK20298-B9_SCFV LV huCCR8 | SYELTQPPSVSVALGQTARISCGGNNI |
| | | GSKNVHWYQQKPGQAPVLVIYRDSN |
| | | RPSGIPERFSGSKSGTTATLTISRAQA |
| | | GDEAEYYCQVWDSSTVVFGGGTQLT |
| | | VL |
| 929 | MPK20299-E2_SCFV HV huCCR8 | QVQLVESGGGVVQPGRSLRLSCAVS |
| | | GFNFSNNGMHWVRQAPGKGLEWVA |
| | | VISYDGSNKYYTDSVKGRFTISRDNS |
| | | KNTLYLQMNSLRTEDTAVYYCAKV |
| | | YYGSGIYYKKRYYYGMDVWGQGTT |
| | | VTVSS |
| 930 | MPK20299-E2_SCFV LV huCCR8 | SYELTQPPSVSVALGQTARITCEGNNI |
| | | GSQNVHWYQQKPGQAPVLVMYRDS |
| | | NRPSGIPERFSGSKSGNTATLAISRAQ |
| | | AGDESDYYCQVWDGSAVVFGGGTK |
| | | LTVL |
| 931 | MPK20299-D6_SCFV HV huCCR8 | QVQLVESGGGVVQPGRSLRLSCAAS |
| | | GFTFSSYGMHWVRQAPGKGLEWVA |
| | | VISYDGSNKYYADSVKGRFTISRDNS |
| | | KNTLYLQMNSLRAEDTAVYFCARVY |
| | | YGSGIYYKKRYYYGMDVWGQGTTV |
| | | TVSS |
| 932 | MPK20299-D6_SCFV LV huCCR8 | SYELTQPLSVSVALGQTARITCEGNNI |
| | | GSQNVHWYQQKPGQAPVLVMYRDS |
| | | NRPSGIPERFSGSKSGNTATLAISRAQ |
| | | AGDESDYYCQVWDGSAVVFGGGTQ |
| | | LTVL |
| 933 | MPK20299-A4_SCFV HV huCCR8 | QVQLVESGGGVVQPGRSLRLSCAAS |
| | | GFTFSNYGFHWVRQTPGKGLEWVA |
| | | VISYDGSNRYYADSVKGRFTISRDNS |
| | | KNTLYLQMNSLRGEDTALYYCARV |
| | | YYGSGTYYKNRYYYGMDVWGQGT |
| | | TVTVSS |
| 934 | MPK20299-A4_SCFV LV huCCR8 | SYELTQPPSVSVALGQTARITCGGHN |
| | | IGSKGVHWYQQKPGQAPVLVIYRNS |
| | | NRPSGIPERFSGSNSGNTATLTISGTQ |
| | | AMDEADYYCQAWDSGTVVFGGGTQ |
| | | LTVL |
| 935 | MPK20300-G5_SCFV HV huCCR8 | QVQLVESGGGVVQPGRSLRLSCAAS |
| | | GFTFSNYGFHWVRQTPGKGLEWVA |
| | | VISYDGSNRYYADSVKGRFTISRDNS |
| | | KNTLYLQMNSLRGEDTALYYCARV |
| | | YYGSGTYYKNRYYYGMDVWGQGT |
| | | TVTVSS |
| 936 | MPK20300-G5_SCFV LV huCCR8 | SYELTQPPSVSVALGQTARITCGANN |
| | | IGSKNVHWYQQKPGQPPVLVIYRDF |
| | | NRPSGIPERFSASNSGNTATLTISRGQ |
| | | AGDEADYYCQVWDSSTGNVVFGGG |
| | | TKLTVL |
| 937 | MPK20299-C3_SCFV HV huCCR8 | QVQLVESGGGVVQPGRSLRLSCAAS |
| | | GFIFSNYGFHWVRQTPGKGLEWVAV |
| | | ISYDGSNKYYADSVKGRFTISRDNSK |
| | | NTLYLQMNSLRGEDTAVYYCARVY |
| | | YGSGSYYKNRYYYGMDVWGQGTT |
| | | VTVSS |
| 938 | MPK20299-C3_SCFV LV huCCR8 | SYELTQPPSVSVAPGQTARITCGGNNI |
| | | GSKNVHWYQQKPGQAPVLVIYRDSN |
| | | RPSGIPERFSGSKSGTTATLTISRAQA |
| | | GDEADYYCQVWDSSTVVFGGGTELT |
| | | VL |
| 939 | MPK20299-B7_SCFV HV huCCR8 | QVQLVESGGGVVQPGRSLRLSCAAS |
| | | GFNFSNYGMHWVRQAPGKGLEWVA |
| | | VISYDGSNKYYADSVKGRFTISRDNS |
| | | KNTLYLQMNSLRAEDTAVYFCARVY |
| | | YGSGIYYKKRYYYGMDVWGQGTTV |
| | | TVSS |
| 940 | MPK20299-B7_SCFV LV huCCR8 | SYELTQSSSVSVAPGQTARITCGGNNI |
| | | GSKNVHWYQQKPGQAPVLVIYRDSN |
| | | RPSGIPERFSGSKSGTTATLTISRVEA |
| | | GDEADYYCQVWDSSSAHVIFGGGTK |
| | | LTVL |
| 941 | MPK20299-A5_SCFV HV huCCR8 | QVQLVESGGGVVQPGRSLRLSCGAS |
| | | GFTFSGYGMHWVRQAPGKGLEWVA |
| | | VISYDGSNKYYADSVKGRFTISRDNS |
| | | KNTLYLQMNSLRGEDTAVYYCARV |
| | | YYGSGIYYKNRYYYGMDVWGQGTT |
| | | VTVSS |
| 942 | MPK20299-A5_SCFV LV huCCR8 | SYELTQPPSGSVALGQTARITCGGNN |
| | | LGSKNVHWYQQKPGQAPVLVIYRNS |
| | | NRPSGIPERFSGSNSGNTATLTISRAQ |
| | | AGDEADYYCQVWDSSTVVFGGGTK |
| | | LTVL |
| 943 | MPK20299-D1_SCFV HV huCCR8 | QVQLVESGGGLVKPGGSLRLSCAAS |
| | | GFTFSNNGMHWVRQAPGKGLEWVA |
| | | VISYDGSNKYYADSVKGRFTISRDNS |
| | | KNTLYLQMNSLRAEDTAVYYCAKV |
| | | YYGSGIYYKNRYYYGMDVWGQGTT |
| | | VTVSS |
| 944 | MPK20299-D1_SCFV LV huCCR8 | SYELTQPPSVSVALGQTARITCGGNRI |
| | | GSKNVHWYQQKPGQAPVLVIYRDSN |
| | | RPSGIPERFSGSKSGTTATLTISRAQA |
| | | GDEAEYYCQVWDSSTVVFGGGTKLT |
| | | VL |
| 945 | MPK20299-C5_SCFV HV huCCR8 | QVQLVESGGGVVQPGRSLRLSCAAS |
| | | GFTFSNYGFHWVRQTPGKGLEWVA |
| | | VISYDGSNRYYADSVKGRFTISRDNS |
| | | KNTLYLQMNSLRGEDTALYYCARV |
| | | YYGSGTYYKNRYYYGMDVWGQGT |
| | | TVTVSS |
| 946 | MPK20299-C5_SCFV LV huCCR8 | SYELTQLPSVSVALGQTARITCGGHN |
| | | IGSKGVHWYQQKPGQAPVLVIYRNS |
| | | NRPSGIPERFSGSNSGNTATLTISRAQ |
| | | AGDEADYYCQVWDSSTVVFGGGTE |
| | | LTVL |
| 947 | MPK20299-B5_SCFV HV huCCR8 | QVQLVESGGGVVQPGRSLRLSCAAS |
| | | GFNFSNYGMHWVRQAPGKGLEWVA |
| | | VISYDGSNKYYADSVKGRFTISRDNS |
| | | KNTLYLQMNSLRAEDTAVYFCARVY |
| | | YGSGIYYKNRYYYGMDVWGQGTTV |
| | | TVSS |
| 948 | MPK20299-B5_SCFV LV huCCR8 | SYELTQPPSVSVALGQTARITCGGHN |
| | | IGSKGVHWYQQKPGQAPVLVIYRNS |
| | | NRPSGIPERFSGSNSGNTATLTISRAQ |
| | | AGDEADYYCQVWDSSTVVFGGGTQ |
| | | LTVL |
| 949 | MPK20299-G9_SCFV HV huCCR8 | QVQLVESGGDLVQPGRSLRLSCAAS |
| | | GFTFSNNGMHWVRQAPGKGLEWVA |
| | | VISNDGSNKYYADSVRGRFTISRDNS |
| | | KNTLYLQMNSLRAEDTAVYYCAKV |
| | | YYGSGIYYKNRYYYGMDVWGQGTT |
| | | VTVSS |
| 950 | MPK20299-G9_SCFV LV huCCR8 | SYELTQPLSVSVALGQTARITCGGNN |
| | | IGSKNVHWYQQKPGQAPVLVIYRNS |
| | | NRPSGIPERFSGSNSGNTATLTLSRVQ |
| | | AGDEADYYCQVWDSSTVVFGGGTK |
| | | LTVL |
| 951 | MPK20299-G5_SCFV HV huCCR8 | QVQLVESGGGVVQPGRSLRLSCAVS |
| | | GFNFSNNGMHWVRQAPGKGLEWVA |
| | | VISNDGSNKYYADSVRGRFTISRDNS |
| | | KNTLYLQMDSLRTEDTAVYYCAKV |
| | | YYGSGIYYKNRYYYGMDVWGQGTT |
| | | VTVSS |
| 952 | MPK20299-G5_SCFV LV huCCR8 | SYELTQPPSVSVALGQTARLTCEGNN |
| | | IGSKNVHWYQQKPGQAPVLVIYRDS |
| | | NRPSGIPERFSGSKSGNTATLAISRAQ |
| | | AGDESDYYCQVWDSSAVVFGGGTK |
| | | LTVL |
| 953 | MPK20298-C10_SCFV HV huCCR8 | QVQLVESGGGVVQPGRSLRLSCAAS |
| | | GFTFSSSGMHWVRQAPGKGLEWVA |
| | | VISNDGSNKYYADSVKGRFTISRDNS |
| | | KNTLYLQMNSLRAEDTAVYYCAKV |
| | | YYGSGIYYKNNYYYGMDVWGQGTT |
| | | VTVSS |
| 954 | MPK20298-C10_SCFV LV huCCR8 | SYELTQPPSVSVALGQTARITCGGNN |
| | | IGSKNVHWYQQKPGQAPVLAIYRNS |
| | | NRPSGIPERFTGSNSGNTATLTISGTQ |
| | | AMDEADYYCQAWDSSTVVFGGGTK |
| | | LTVL |
| 955 | MPK20298-B5_SCFV HV huCCR8 | QVQLVESGGGVVQPGRSLRLSCAAS |
| | | GFNFSNYGMHWVRQAPGKGLEWVA |
| | | VISYDGSNKYYADSVKGRFTISRDNS |
| | | KNTLYLQMNSLRAEDTAVYFCARVY |
| | | YGSGIYYKKRYYYGMDVWGQGTTV |
| | | TVSS |
| 956 | MPK20298-B5_SCFV LV huCCR8 | SYELTQPPSVSVALGQTARITCGGNN |
| | | IGSQNVHWYQQKPGQAPVLVIYRDS |
| | | NRPSGIPERFSGSKSGNTATLAISRAQ |
| | | AGDESDYYCQVWDSSAVVFGGGTQ |
| | | LTVL |
| 957 | MPK20299-F2_SCFV HV huCCR8 | QVQLVESGGGVVQPGRSLRLSCAAS |
| | | GFTLSSSGMHWVRQAPGKGLEWVA |
| | | VISNDGSNKYYADSVKGRFTISRDDS |
| | | KNTLYLQMDSLRTEDTAVYYCAKV |
| | | YYGSGIYYKNRYYYGMDVWGQGTT |
| | | VTVSS |
| 958 | MPK20299-F2_SCFV LV huCCR8 | SYELTQPPSVSVALGQTARISCGGNNI |
| | | GSKNVHWYQQKPGQAPVLVMYRDS |
| | | NRPSGIPERFSGSNSGNTATLTISGTQ |
| | | AMDEADYYCQAWDSGTVVFGGGTK |
| | | LTVL |
| 959 | MPK20298-D4_SCFV HV huCCR8 | QVQLVESGGGVVQPGRSLRLSCAAS |
| | | GFNFSNYGMHWVRQAPGKGLEWVA |
| | | VISYDGSNKYYADSVKGRFTISRDNS |
| | | KNTLYLQMNSLRAEDTAVYFCARVY |
| | | YGSGIYYKKRYYYGMDVWGQGTTV |
| | | TVSS |
| 960 | MPK20298-D4_SCFV LV huCCR8 | SYELTQPPSVSVALGQTARITCGGNN |
| | | IGGKNVHWYQQKPGQAPVLVIYRDS |
| | | NRPSGIPERFSGSKSGNTATLTISRAQ |
| | | AGDESDYYCQVWDSSTVVFGGGTQ |
| | | LTVL |
| 961 | MPK20297-F5_SCFV HV huCCR8 | QVQLVESGGGVVQPGRSLRLSCVVS |
| | | GFNFSRNGMHWVRQVPGRGLDWVA |
| | | VISNDGSNKYYADSVKGRFTISRDNS |
| | | KNTLYLQMNSLRAEDTAVYYCAKV |
| | | YYGSGIYYKNNYYYGMDVWGQGTT |
| | | VTVSS |
| 962 | MPK20297-F5_SCFV LV huCCR8 | SYELTQPLSVSVALGQTARITCGGNN |
| | | IGSKNVHWYQQKPGQAPVLVIYRNS |
| | | NRPSGIPERFSGSNSGNTATLTISRAQ |
| | | AGDEADYYCQVWDSSTVVFGGGTK |
| | | LTVL |
| 963 | MPK20299-D9_SCFV HV huCCR8 | QVQLVESGGGLVKPGGSLRLSCAAS |
| | | GFNFSRNGMHWVRQVPGRGLDWVA |
| | | VISNDGSNKYYADSVKGRFTISRDNS |
| | | KNTLYLQMNSLRAEDTAVYYCAKV |
| | | YYGSGIYYKNNYYYGMDVWGQGTT |
| | | VTVSS |
| 964 | MPK20299-D9_SCFV LV huCCR8 | SYELTQPPSVSVALGQTARISCGGNNI |
| | | ESKNVHWYQQKPGQAPVLVIYRDSN |
| | | RPSGIPERFSGSKSGTTATLTISRAQA |
| | | GDEAEYYCQVWDSSTVVFGGGTQLT |
| | | VI |
| 965 | huCCR8_32360_huIgG1z | EVQLVESGGGLVKPGGSLRLSCAAS |
| | mAb(LC: K38R)_HC HV huCCR8 | GFTFSNARMGWVRQAPGKGLEWVG |
| | | RIKSKTEGGTRDYAAPVKGRFTISRD |
| | | DSKNTLYLQMNSLKTEDTAVYYCTS |
| | | YSGVWGQGTMVTVSS |
| 966 | huCCR8_32360_huIgG1z | DIVMTQSPDSLAVSLGERATINCKSS |
| | mAb(LC: K38R)_LC LV huCCR8 | QSVLYSSNNRNYLAWYHQKPGQSPK |
| | | LLISWASTRESGVPDRFSGSGSGTDFT |
| | | LTINSLQAEDVAVYYCQQYYSIPITFG |
| | | GGTKVEIKR |
| 967 | anti- | QVQLVESGGGVVQPGRSLRLSCAAS |
| | huCCR8_44379(VH: D72S, VL: N67A_S68A_ | GFTFSNYGFHWVRQTPGKGLEWVA |
| | M99G_W109F_S111A)_huIgG1z (mAb)_HC | VISYDGSNRYYASSVKGRFTISRDNS |
| | HV huCCR8 | KNTLYLQMNSLRGEDTALYYCARV |
| | | YYGSGTYYKNRYYYGMDVWGQGT |
| | | TVTVSS |
| 968 | anti- | SYELTQPPSVSVALGQTARITCGGHN |
| | huCCR8_44379(VH: D72S, VL: N67A_S68A_ | IGSKGVHWYQQKPGQAPVLVIYRAA |
| | M99G_W109F_S111A)_huIgG1z (mAb)_LC | NRPSGIPERFSGSNSGNTATLTISGTQ |
| | LV huCCR8 | AGDEADYYCQAFDAGTVVFGGGTQ |
| | | LTVLG |
| 969 | anti- | QVQLVESGGGVVQPGRSLRLSCAAS |
| | huCCR8_44379(VH: D61A_D72A, VL: N67Q_ | GFTFSNYGFHWVRQTPGKGLEWVA |
| | M99E_W109F_S111A)_huIgG1z | VISYAGSNRYYAASVKGRFTISRDNS |
| | (mAb) HC HV huCCR8 | KNTLYLQMNSLRGEDTALYYCARV |
| | | YYGSGTYYKNRYYYGMDVWGQGT |
| | | TVTVSS |
| 970 | anti- | SYELTQPPSVSVALGQTARITCGGHN |
| | huCCR8_44379(VH: D61A_D72A, VL: N67Q_ | IGSKGVHWYQQKPGQAPVLVIYRQS |
| | M99E_W109F_S111A)_huIgG1z | NRPSGIPERFSGSNSGNTATLTISGTQ |
| | (mAb) LC LV huCCR8 | AEDEADYYCQAFDAGTVVFGGGTQ |
| | | LTVLG |
| 971 | anti- | QVQLVESGGGVVQPGRSLRLSCAAS |
| | huCCR8_44379(VH: D61S, VL: N67Q_M99G | GFTFSNYGFHWVRQTPGKGLEWVA |
| | _W109F_S111A)_huIgG1z (mAb)_HC HV | VISYSGSNRYYADSVKGRFTISRDNS |
| | huCCR8 | KNTLYLQMNSLRGEDTALYYCARV |
| | | YYGSGTYYKNRYYYGMDVWGQGT |
| | | TVTVSS |
| 972 | anti- | SYELTQPPSVSVALGQTARITCGGHN |
| | huCCR8_44379(VH: D61S,VL: N67Q_M99G | IGSKGVHWYQQKPGQAPVLVIYRQS |
| | _W109F_S111A)_huIgG1z (mAb)_LC LV | NRPSGIPERFSGSNSGNTATLTISGTQ |
| | huCCR8 | AGDEADYYCQAFDAGTVVFGGGTQ |
| | | LTVLG |
| 973 | Hu anti-huCCR8 LIBC315615-1 HuIgG1z | SYELTQPLSVSVALGQTARITCGGHN |
| | mAb_LC LV huCCR8 | IGSKGVHWYQQKPGQAPVLVIYRNS |
| | | NRPSGIPERFSGSNSGNTATLTISRAQ |
| | | AGDEADYYCQVWDISTVVFGGGTEL |
| | | TVLG |
| 974 | Hu anti-huCCR8 LIBC315615-1 HuIgG1z | QVQLVESGGGVAQPGRSLRLSCAAS |
| | mAb_HC HV huCCR8 | GFNFSNCGMHWVRQAPGKGLEWVA |
| | | VISYDGGNKYHADSVKGRFTISRDDS |
| | | KNTLYLQMDSLRTEDTAVYYCAKV |
| | | YYGSGIYYKNRYYYGMDVWGQGTT |
| | | VTVSS |
| 975 | Hu anti-huCCR8 LIBC317152-1 HuIgG1z | SYELTQPLSVSVALGQTARITCGGHN |
| | mAb_LC LV huCCR8 | IGSKGVHWYQQKPGQAPVLVIYRNS |
| | | NRPSGIPERFSGSNSGKTATLTISRAQ |
| | | AGDEADYYCQVWDSSTVVFGGGTE |
| | | LTVLG |
| 976 | Hu anti-huCCR8 LIBC317152-1 HuIgG1z | QVQLVESGGGVAQPGRSLRLSCAAS |
| | mAb_HC HV huCCR8 | GFNFSNCGMHWVRQAPGKGLEWVA |
| | | VISYDGGNKYYADSVKGRFTISRDDS |
| | | KNTLYLQMDSLRTEDTAVYYCAKV |
| | | YYGSGIYYKNRYYYGMDVWGQGTT |
| | | VTVSS |
| 977 | Hu anti-huCCR8 LIBC317471-1 HuIgG1z | SYELTQPLSVSVALGQTARITCGGNN |
| | mAb_LC LV huCCR8 | IGSKNVHWYQKRPGQAPVLVIYRDS |
| | | NRPSGIPERFSGSKSGNTATLTISRAQ |
| | | AGDEADYYCQVWDSNTVVFGGGTN |
| | | LTVLG |
| 978 | Hu anti-huCCR8 LIBC317471-1 HuIgG1z | QVQLVESGGGVVQPGRSLRLSCVVS |
| | mAb_HC HV huCCR8 | GFNFSNNGMHWVRQAPGKGLEWVA |
| | | VISNDGSNKYYADSVRGRFTISRDNS |
| | | KNTLYLQMNSLRAEDTAVYSCAKV |
| | | YYGSGIYYKNNYYYGMDVWGQGTT |
| | | VTVSS |
| 979 | Hu anti-huCCR8 LIBC317977-1 HuIgG1z | SYELTQPLSVSVALGQTARITCGGNN |
| | mAb_LC LV huCCR8 | IGSKNVHWYQQKAGQAPVQVIYRNS |
| | | NRPSGIPERFSGSNSGNTATLTISRAQ |
| | | AGDEADYYCQVWDSSTVVFGGGTK |
| | | LTVLG |
| 980 | Hu anti-huCCR8 LIBC317977-1 HuIgG1z | QVQLVESGGGVVQPGRSLRLSCAAS |
| | mAb_HC HV huCCR8 | GFNFNTYGMHWVRQAPGKGLEWVA |
| | | VISYDGSNKYYADSVKGRFTISRDNS |
| | | KSTLYLQMNSLRAEDTAVYYCARVY |
| | | YGSGSYYKKNYYYGMDVWGQGTT |
| | | VTVSS |
| 981 | Hu anti-huCCR8 LIBC318774-1 HuIgG1z | SYELTQPLSVSVALGQTARITCGGNN |
| | mAb_LC LV huCCR8 | IGGKNVHWYQQKPGQAPVLVIYRDS |
| | | NRPSGIPERFSGSKSGNTATLTISRAQ |
| | | AGDESDYYCQVWDSSTVVFGGGTTL |
| | | TVLG |
| 982 | Hu anti-huCCR8 LIBC318774-1 HuIgG1z | QVQVVESGGGVVQPGRSLRLSCAAS |
| | mAb_HC HV huCCR8 | GFTLSSYGFHWVRQTPGKGLEWVAV |
| | | ISYDGSNKYYADSVKGRFTISRDNSK |
| | | NTLYLQMNSLRGEDTAVYYCARVY |
| | | YGSGTYYKNRYYYGMDVWGQGTT |
| | | VTVSS |
| 983 | Hu anti-huCCR8 LIBC319840-1 HuIgG1z | SYELTQPLSVSEALGQTARITCGGNNI |
| | mAb_LC LV huCCR8 | GSKNVHWYQQKPGQAPVLVIYRDSN |
| | | RPSGIPERFSGSKSGNTATLTISRAQA |
| | | GDEADYYCQVWDSSTVVFGGGTKV |
| | | TVLG |
| 984 | Hu anti-huCCR8 LIBC319840-1 HuIgG1z | QVQLVESGGGVVQPGRSLRLSCVVS |
| | mAb_HC HV huCCR8 | GFNFINNGMHWVRQAPGKGLDWVA |
| | | VISNDGSNKYYPDSVKGRFTISRDNS |
| | | KNTLYLQMNSLRAEDSAVYYCAKV |
| | | YYGSGNYYKNNYYYGMDVWGQGT |
| | | TVTVSS |
| 985 | Hu anti-huCCR8 LIBC320212-1 HuIgG1z | SYELTQPLSVSVALGQTARITCEGNNI |
| | mAb_LC LV huCCR8 | GSQNVHWYQQKPGQAPVLVMYRDS |
| | | NRPSGIPERFSGSKSGNTATLAISRAQ |
| | | AGDESDYYCQVWDGSAVVFGGGTT |
| | | LTVLG |
| 986 | Hu anti-huCCR8 LIBC320212-1 HuIgG1z | QMQVVESGGGVVQPGRSLRLSCAAS |
| | mAb_HC HV huCCR8 | GFTFSSSGMHWVRQAPGKGLEWVA |
| | | VISHDGSNKYYADSVKGRFTISRDNS |
| | | KNTLYLQMNSLGGEDTAVYYCAKV |
| | | YYGSGIYYKNRYYYGMDVWGQGTT |
| | | VIVSS |
| 987 | Hu anti-huCCR8 LIBC320384-1 HuIgG1z | SYELTQPLSVSVALGQTARITCGGHN |
| | mAb_LC LV huCCR8 | IGSKGVHWYQQKPGQAPVLVIYRNS |
| | | NRPSGIPERFSGSNSGNTATLTISRAQ |
| | | AGDEADYYCQVWDSSTVVFGGGTE |
| | | LTVLG |
| 988 | Hu anti-huCCR8 LIBC320384-1 HuIgG1z | QVQLVESGGGVAQPGRSLRLSCAAS |
| | mAb_HC HV huCCR8 | GFNFSDCGMHWVRQAPGKGLEWVA |
| | | VISYDGGNKYYADSVKGRFTISRDDS |
| | | KNTLYLQTDSLRTEDTAVYYCAKVY |
| | | YGSGIYYKNRYYYGMDVWGQGTTV |
| | | TVSS |
| 989 | Hu anti-huCCR8 LIBC320689-1 HuIgG1z | SYELTQPLSVSVALGQTGRITCGGNN |
| | mAb_LC LV huCCR8 | IGSKNVHWYQQKPGQAPVLVIYRSS |
| | | NRPSGIPERFSGSNSGNTATLTISRAQ |
| | | AGDESDYYCQIWDSSTVVFGGGTKL |
| | | TVLG |
| 990 | Hu anti-huCCR8 LIBC320689-1 HuIgG1z | QVQVVESGGGVVQPGRSLRLSCAAS |
| | mAb_HC HV huCCR8 | GFTFSSYGMHWVRQAPGKGLEWVA |
| | | VISFDGNNKYYADSVKGRFTISRDNS |
| | | KNTLYLQMNSLRGEDTAVYYCARV |
| | | YYGSGSYYKNRYYYGMDVWGQGT |
| | | TVTVST |
| 991 | Hu anti-huCCR8 LIBC321408-1 HuIgG1z | SYELTQPLSVSVALGQTARITCGGNN |
| | mAb_LC LV huCCR8 | IGSKNVHWYQQRPGQAPVLVIYRDS |
| | | NRPSGIPERLSGSKAGNTATLTISRAH |
| | | AGDEADYYCQVWDSSTVVFGGGTE |
| | | LTVQG |
| 992 | Hu anti-huCCR8 LIBC321408-1 HuIgG1z | QVQLVESGGGVVQPGRSLRLSCAVS |
| | mAb_HC HV huCCR8 | GFTFSSNGMHWVRQAPGKGLEWVA |
| | | VISNDGSNKYYGDSVKGRFTISRDNS |
| | | KNTLYLQMNSLRAEDTAVYYCAKV |
| | | YYGSGIYYRNNYYYGMDVWGQGTT |
| | | VTVSS |
| 993 | Hu anti-huCCR8 LIBC321824-1 HuIgG1z | SYELTQPLSVSVALGQTARITCGGNN |
| | mAb_LC LV huCCR8 | IGSKNVHWYQQKPGQAPILVIYRNTN |
| | | RPSGIPERFSGSNSGNTATLTISRAQV |
| | | GDESDYFCQVWDSSTVVFGGGTKLT |
| | | VLG |
| 994 | Hu anti-huCCR8 LIBC321824-1 HuIgG1z | QVQVVESGGGVVQPGRSLRLSCGAS |
| | mAb_HC HV huCCR8 | GFTFSGYGMHWVRQAPGKGLEWVA |
| | | VISYDGSNKYYADSVKGRFPISRDNS |
| | | KNTLYLQMNSLRGEDTAVYYCARV |
| | | YYGSGIYYKNRYYYGMDVWGQGTT |
| | | VAVSS |
| 995 | Hu anti-huCCR8 LIBC321845-1 HuIgG1z | SYELTQPLSVSVALGQTARITCGGNN |
| | mAb_LC LV huCCR8 | IGSKNVHWYQQKPGQAPILVIYRNTN |
| | | RPSGIPERFSGSNSGNTATLTISRAQV |
| | | GDESDYFCQVWDSSTVVFGGGTKLT |
| | | VLG |
| 996 | Hu anti-huCCR8 LIBC321845-1 HuIgG1z | QVQVVESGGGVVQPGRSLRLSCGAS |
| | mAb_HC HV huCCR8 | GFTFSGYGMHWVRQAPGKGLEWVA |
| | | VISYDGSNKYYADSVKGRFTISRDNS |
| | | KNTLYLQMNSLRGEDTAVYYCARV |
| | | YYGSGIYYKNRYYYGMDVWGQGTT |
| | | VAVSS |
| 997 | Hu anti-huCCR8 LIBC322176-1 HuIgG1z | SYDLTQPLSVSVALGQTARITCGGNN |
| | mAb_LC LV huCCR8 | IGDKNVHWYQQKPGQAPVLVIYRNN |
| | | VRPSGIPERFSGSNSGNTATLTISRAQ |
| | | AGDEADYYCQVWDSSTVVFGGGTK |
| | | LTVLG |
| 998 | Hu anti-huCCR8 LIBC322176-1 HuIgG1z | QVQLVESGGGVVQPGRSLRLSCAAS |
| | mAb_HC HV huCCR8 | GLNFSNFGMHWVRQAPGKGLDWVA |
| | | VISYDGGNKYYADSVKGRFTVSRDN |
| | | SKNTLFLQMNSLRAEDTALYYCAKV |
| | | YYGSGSYYKKRYYYGMDVWGQGT |
| | | TVTVSS |
| 999 | Hu anti-huCCR8 LIBC323412-1 HuIgG1z | SYELTQPLSVSVALGQTARITCGGNN |
| | mAb_LC LV huCCR8 | IGSKNVHWYQQKPGQAPVLVIYRDS |
| | | NRPSGIPERFSGSKSGNTATLTISRAQ |
| | | AGDEADYYCQVWDSSTVVFGGGAK |
| | | LTVLG |
| 1000 | Hu anti-huCCR8 LIBC323412-1 HuIgG1z | QVQLVESGGGVVQPGRSLRLSCAAS |
| | mAb_HC HV huCCR8 | GFNFSSCGMHWVRQAPGKGLEWVA |
| | | VISYDGTNKYYADSVKGRFTISRDNS |
| | | KNTLYLQMNSLRAEDTAVYYCAKV |
| | | YYGSGIYYKKNYYYGMDVWGQGTT |
| | | VTVSS |
| 1001 | huCCR8_32360_huIgG1z mAb_HC HV | EVQLVESGGGLVKPGGSLRLSCAAS |
| | huCCR8 | GFTFSNARMGWVRQAPGKGLEWVG |
| | | RIKSKTEGGTRDYAAPVKGRFTISRD |
| | | DSKNTLYLQMNSLKTEDTAVYYCTS |
| | | YSGVWGQGTMVTVSS |
| 1002 | huCCR8_32360_huIgG1z mAb_LC LV | DIVMTQSPDSLAVSLGERATINCKSS |
| | huCCR8 | QSVLYSSNNKNYLAWYHQKPGQSPK |
| | | LLISWASTRESGVPDRFSGSGSGTDFT |
| | | LTINSLQAEDVAVYYCQQYYSIPITFG |
| | | GGTKVEIKR |
| 1003 | huCCR8_32360_huIgG1z | ASTKGPSVFPLAPSSKSTSGGTAALG |
| | mAb(LC: K38R) HC Constant | CLVKDYFPEPVTVSWNSGALTSGVH |
| | | TFPAVLQSSGLYSLSSVVTVPSSSLGT |
| | | QTYICNVNHKPSNTKVDKKVEPKSC |
| | | DKTHTCPPCPAPELLGGPSVFLFPPKP |
| | | KDTLMISRTPEVTCVVVDVSHEDPEV |
| | | KFNWYVDGVEVHNAKTKPREEQYN |
| | | STYRVVSVLTVLHQDWLNGKEYKC |
| | | KVSNKALPAPIEKTISKAKGQPREPQ |
| | | VYTLPPSREEMTKNQVSLTCLVKGF |
| | | YPSDIAVEWESNGQPENNYKTTPPVL |
| | | DSDGSFFLYSKLTVDKSRWQQGNVF |
| | | SCSVMHEALHNHYTQKSLSLSPGK |
| 1004 | huCCR8_32360_huIgG1z | TVAAPSVFIFPPSDEQLKSGTASVVCL |
| | mAb(LC: K38R)_LC Constant | LNNFYPREAKVQWKVDNALQSGNS |
| | | QESVTEQDSKDSTYSLSSTLTLSKAD |
| | | YEKHKVYACEVTHQGLSSPVTKSFN |
| | | RGEC |
| 1005 | anti- | ASTKGPSVFPLAPSSKSTSGGTAALG |
| | huCCR8_44379(VH: D72S, VL: N67A_S68A_ | CLVKDYFPEPVTVSWNSGALTSGVH |
| | M99G_W109F_S111A)_huIgG1z (mAb)_HC | TFPAVLQSSGLYSLSSVVTVPSSSLGT |
| | Constant | QTYICNVNHKPSNTKVDKKVEPKSC |
| | | DKTHTCPPCPAPELLGGPSVFLFPPKP |
| | | KDTLMISRTPEVTCVVVDVSHEDPEV |
| | | KFNWYVDGVEVHNAKTKPREEQYN |
| | | STYRVVSVLTVLHQDWLNGKEYKC |
| | | KVSNKALPAPIEKTISKAKGQPREPQ |
| | | VYTLPPSREEMTKNQVSLTCLVKGF |
| | | YPSDIAVEWESNGQPENNYKTTPPVL |
| | | DSDGSFFLYSKLTVDKSRWQQGNVF |
| | | SCSVMHEALHNHYTQKSLSLSPGK |
| 1006 | anti- | QPKAAPSVTLFPPSSEELQANKATLV |
| | huCCR8_44379(VH: D72S, VL: N67A_S68A_ | CLISDFYPGAVTVAWKADSSPVKAG |
| | M99G_W109F_S111A)_huIgG1z (mAb)_LC | VETTTPSKQSNNKYAASSYLSLTPEQ |
| | Constant | WKSHRSYSCQVTHEGSTVEKTVAPT |
| | | ECS |
| 1007 | anti- | ASTKGPSVFPLAPSSKSTSGGTAALG |
| | huCCR8_44379(VH: D61A_D72A, VL: N67Q_ | CLVKDYFPEPVTVSWNSGALTSGVH |
| | M99E_W109F_S111A)_huIgG1z | TFPAVLQSSGLYSLSSVVTVPSSSLGT |
| | (mAb)_HC Constant | QTYICNVNHKPSNTKVDKKVEPKSC |
| | | DKTHTCPPCPAPELLGGPSVFLFPPKP |
| | | KDTLMISRTPEVTCVVVDVSHEDPEV |
| | | KFNWYVDGVEVHNAKTKPREEQYN |
| | | STYRVVSVLTVLHQDWLNGKEYKC |
| | | KVSNKALPAPIEKTISKAKGQPREPQ |
| | | VYTLPPSREEMTKNQVSLTCLVKGF |
| | | YPSDIAVEWESNGQPENNYKTTPPVL |
| | | DSDGSFFLYSKLTVDKSRWQQGNVF |
| | | SCSVMHEALHNHYTQKSLSLSPGK |
| 1008 | anti- | QPKAAPSVTLFPPSSEELQANKATLV |
| | huCCR8_44379(VH: D61A_D72A, VL: N67Q_ | CLISDFYPGAVTVAWKADSSPVKAG |
| | M99E_W109F_S111A)_huIgG1z | VETTTPSKQSNNKYAASSYLSLTPEQ |
| | (mAb)_LC Constant | WKSHRSYSCQVTHEGSTVEKTVAPT |
| | | ECS |
| 1009 | anti- | ASTKGPSVFPLAPSSKSTSGGTAALG |
| | huCCR8_44379(VH: D61S, VL: N67Q_M99G | CLVKDYFPEPVTVSWNSGALTSGVH |
| | _W109F_S111A)_huIgG1z (mAb)_HC | TFPAVLQSSGLYSLSSVVTVPSSSLGT |
| | Constant | QTYICNVNHKPSNTKVDKKVEPKSC |
| | | DKTHTCPPCPAPELLGGPSVFLFPPKP |
| | | KDTLMISRTPEVTCVVVDVSHEDPEV |
| | | KFNWYVDGVEVHNAKTKPREEQYN |
| | | STYRVVSVLTVLHQDWLNGKEYKC |
| | | KVSNKALPAPIEKTISKAKGQPREPQ |
| | | VYTLPPSREEMTKNQVSLTCLVKGF |
| | | YPSDIAVEWESNGQPENNYKTTPPVL |
| | | DSDGSFFLYSKLTVDKSRWQQGNVF |
| | | SCSVMHEALHNHYTQKSLSLSPGK |
| 1010 | anti- | QPKAAPSVTLFPPSSEELQANKATLV |
| | huCCR8_44379(VH: D61S, VL: N67Q_M99G | CLISDFYPGAVTVAWKADSSPVKAG |
| | _W109F_S111A)_huIgG1z (mAb)_LC | VETTTPSKQSNNKYAASSYLSLTPEQ |
| | Constant | WKSHRSYSCQVTHEGSTVEKTVAPT |
| | | ECS |
| 1011 | Hu anti-huCCR8 LIBC315615-1 HuIgG1z | QPKAAPSVTLFPPSSEELQANKATLV |
| | mAb_LC Constant | CLISDFYPGAVTVAWKADSSPVKAG |
| | | VETTTPSKQSNNKYAASSYLSLTPEQ |
| | | WKSHRSYSCQVTHEGSTVEKTVAPT |
| | | ECS |
| 1012 | Hu anti-huCCR8 LIBC315615-1 HuIgG1z | ASTKGPSVFPLAPSSKSTSGGTAALG |
| | mAb_HC Constant | CLVKDYFPEPVTVSWNSGALTSGVH |
| | | TFPAVLQSSGLYSLSSVVTVPSSSLGT |
| | | QTYICNVNHKPSNTKVDKKVEPKSC |
| | | DKTHTCPPCPAPELLGGPSVFLFPPKP |
| | | KDTLMISRTPEVTCVVVDVSHEDPEV |
| | | KFNWYVDGVEVHNAKTKPREEQYN |
| | | STYRVVSVLTVLHQDWLNGKEYKC |
| | | KVSNKALPAPIEKTISKAKGQPREPQ |
| | | VYTLPPSREEMTKNQVSLTCLVKGF |
| | | YPSDIAVEWESNGQPENNYKTTPPVL |
| | | DSDGSFFLYSKLTVDKSRWQQGNVF |
| | | SCSVMHEALHNHYTQKSLSLSPGK |
| 1013 | Hu anti-huCCR8 LIBC317152-1 HuIgG1z | QPKAAPSVTLFPPSSEELQANKATLV |
| | mAb_LC Constant | CLISDFYPGAVTVAWKADSSPVKAG |
| | | VETTTPSKQSNNKYAASSYLSLTPEQ |
| | | WKSHRSYSCQVTHEGSTVEKTVAPT |
| | | ECS |
| 1014 | Hu anti-huCCR8 LIBC317152-1 HuIgG1z | ASTKGPSVFPLAPSSKSTSGGTAALG |
| | mAb_HC Constant | CLVKDYFPEPVTVSWNSGALTSGVH |
| | | TFPAVLQSSGLYSLSSVVTVPSSSLGT |
| | | QTYICNVNHKPSNTKVDKKVEPKSC |
| | | DKTHTCPPCPAPELLGGPSVFLFPPKP |
| | | KDTLMISRTPEVTCVVVDVSHEDPEV |
| | | KFNWYVDGVEVHNAKTKPREEQYN |
| | | STYRVVSVLTVLHQDWLNGKEYKC |
| | | KVSNKALPAPIEKTISKAKGQPREPQ |
| | | VYTLPPSREEMTKNQVSLTCLVKGF |
| | | YPSDIAVEWESNGQPENNYKTTPPVL |
| | | DSDGSFFLYSKLTVDKSRWQQGNVF |
| | | SCSVMHEALHNHYTQKSLSLSPGK |
| 1015 | Hu anti-huCCR8 LIBC317471-1 HuIgG1z | QPKAAPSVTLFPPSSEELQANKATLV |
| | mAb_LC Constant | CLISDFYPGAVTVAWKADSSPVKAG |
| | | VETTTPSKQSNNKYAASSYLSLTPEQ |
| | | WKSHRSYSCQVTHEGSTVEKTVAPT |
| | | ECS |
| 1016 | Hu anti-huCCR8 LIBC317471-1 HuIgG1z | ASTKGPSVFPLAPSSKSTSGGTAALG |
| | mAb_HC Constant | CLVKDYFPEPVTVSWNSGALTSGVH |
| | | TFPAVLQSSGLYSLSSVVTVPSSSLGT |
| | | QTYICNVNHKPSNTKVDKKVEPKSC |
| | | DKTHTCPPCPAPELLGGPSVFLFPPKP |
| | | KDTLMISRTPEVTCVVVDVSHEDPEV |
| | | KFNWYVDGVEVHNAKTKPREEQYN |
| | | STYRVVSVLTVLHQDWLNGKEYKC |
| | | KVSNKALPAPIEKTISKAKGQPREPQ |
| | | VYTLPPSREEMTKNQVSLTCLVKGF |
| | | YPSDIAVEWESNGQPENNYKTTPPVL |
| | | DSDGSFFLYSKLTVDKSRWQQGNVF |
| | | SCSVMHEALHNHYTQKSLSLSPGK |
| 1017 | Hu anti-huCCR8 LIBC317977-1 HuIgG1z | QPKAAPSVTLFPPSSEELQANKATLV |
| | mAb_LC Constant | CLISDFYPGAVTVAWKADSSPVKAG |
| | | VETTTPSKQSNNKYAASSYLSLTPEQ |
| | | WKSHRSYSCQVTHEGSTVEKTVAPT |
| | | ECS |
| 1018 | Hu anti-huCCR8 LIBC317977-1 HuIgG1z | ASTKGPSVFPLAPSSKSTSGGTAALG |
| | mAb_HC Constant | CLVKDYFPEPVTVSWNSGALTSGVH |
| | | TFPAVLQSSGLYSLSSVVTVPSSSLGT |
| | | QTYICNVNHKPSNTKVDKKVEPKSC |
| | | DKTHTCPPCPAPELLGGPSVFLFPPKP |
| | | KDTLMISRTPEVTCVVVDVSHEDPEV |
| | | KFNWYVDGVEVHNAKTKPREEQYN |
| | | STYRVVSVLTVLHQDWLNGKEYKC |
| | | KVSNKALPAPIEKTISKAKGQPREPQ |
| | | VYTLPPSREEMTKNQVSLTCLVKGF |
| | | YPSDIAVEWESNGQPENNYKTTPPVL |
| | | DSDGSFFLYSKLTVDKSRWQQGNVF |
| | | SCSVMHEALHNHYTQKSLSLSPGK |
| 1019 | Hu anti-huCCR8 LIBC318774-1 HuIgG1z | QPKAAPSVTLFPPSSEELQANKATLV |
| | mAb_LC Constant | CLISDFYPGAVTVAWKADSSPVKAG |
| | | VETTTPSKQSNNKYAASSYLSLTPEQ |
| | | WKSHRSYSCQVTHEGSTVEKTVAPT |
| | | ECS |
| 1020 | Hu anti-huCCR8 LIBC318774-1 HuIgG1z | ASTKGPSVFPLAPSSKSTSGGTAALG |
| | mAb_HC Constant | CLVKDYFPEPVTVSWNSGALTSGVH |
| | | TFPAVLQSSGLYSLSSVVTVPSSSLGT |
| | | QTYICNVNHKPSNTKVDKKVEPKSC |
| | | DKTHTCPPCPAPELLGGPSVFLFPPKP |
| | | KDTLMISRTPEVTCVVVDVSHEDPEV |
| | | KFNWYVDGVEVHNAKTKPREEQYN |
| | | STYRVVSVLTVLHQDWLNGKEYKC |
| | | KVSNKALPAPIEKTISKAKGQPREPQ |
| | | VYTLPPSREEMTKNQVSLTCLVKGF |
| | | YPSDIAVEWESNGQPENNYKTTPPVL |
| | | DSDGSFFLYSKLTVDKSRWQQGNVF |
| | | SCSVMHEALHNHYTQKSLSLSPGK |
| 1021 | Hu anti-huCCR8 LIBC319840-1 HuIgG1z | QPKAAPSVTLFPPSSEELQANKATLV |
| | mAb_LC Constant | CLISDFYPGAVTVAWKADSSPVKAG |
| | | VETTTPSKQSNNKYAASSYLSLTPEQ |
| | | WKSHRSYSCQVTHEGSTVEKTVAPT |
| | | ECS |
| 1022 | Hu anti-huCCR8 LIBC319840-1 HuIgG1z | ASTKGPSVFPLAPSSKSTSGGTAALG |
| | mAb_HC Constant | CLVKDYFPEPVTVSWNSGALTSGVH |
| | | TFPAVLQSSGLYSLSSVVTVPSSSLGT |
| | | QTYICNVNHKPSNTKVDKKVEPKSC |
| | | DKTHTCPPCPAPELLGGPSVFLFPPKP |
| | | KDTLMISRTPEVTCVVVDVSHEDPEV |
| | | KFNWYVDGVEVHNAKTKPREEQYN |
| | | STYRVVSVLTVLHQDWLNGKEYKC |
| | | KVSNKALPAPIEKTISKAKGQPREPQ |
| | | VYTLPPSREEMTKNQVSLTCLVKGF |
| | | YPSDIAVEWESNGQPENNYKTTPPVL |
| | | DSDGSFFLYSKLTVDKSRWQQGNVF |
| | | SCSVMHEALHNHYTQKSLSLSPGK |
| 1023 | Hu anti-huCCR8 LIBC320212-1 HuIgG1z | QPKAAPSVTLFPPSSEELQANKATLV |
| | mAb_LC Constant | CLISDFYPGAVTVAWKADSSPVKAG |
| | | VETTTPSKQSNNKYAASSYLSLTPEQ |
| | | WKSHRSYSCQVTHEGSTVEKTVAPT |
| | | ECS |
| 1024 | Hu anti-huCCR8 LIBC320212-1 HuIgG1z | ASTKGPSVFPLAPSSKSTSGGTAALG |
| | mAb_HC Constant | CLVKDYFPEPVTVSWNSGALTSGVH |
| | | TFPAVLQSSGLYSLSSVVTVPSSSLGT |
| | | QTYICNVNHKPSNTKVDKKVEPKSC |
| | | DKTHTCPPCPAPELLGGPSVFLFPPKP |
| | | KDTLMISRTPEVTCVVVDVSHEDPEV |
| | | KFNWYVDGVEVHNAKTKPREEQYN |
| | | STYRVVSVLTVLHQDWLNGKEYKC |
| | | KVSNKALPAPIEKTISKAKGQPREPQ |
| | | VYTLPPSREEMTKNQVSLTCLVKGF |
| | | YPSDIAVEWESNGQPENNYKTTPPVL |
| | | DSDGSFFLYSKLTVDKSRWQQGNVF |
| | | SCSVMHEALHNHYTQKSLSLSPGK |
| 1025 | Hu anti-huCCR8 LIBC320384-1 HuIgG1z | QPKAAPSVTLFPPSSEELQANKATLV |
| | mAb_LC Constant | CLISDFYPGAVTVAWKADSSPVKAG |
| | | VETTTPSKQSNNKYAASSYLSLTPEQ |
| | | WKSHRSYSCQVTHEGSTVEKTVAPT |
| | | ECS |
| 1026 | Hu anti-huCCR8 LIBC320384-1 HuIgG1z | ASTKGPSVFPLAPSSKSTSGGTAALG |
| | mAb_HC Constant | CLVKDYFPEPVTVSWNSGALTSGVH |
| | | TFPAVLQSSGLYSLSSVVTVPSSSLGT |
| | | QTYICNVNHKPSNTKVDKKVEPKSC |
| | | DKTHTCPPCPAPELLGGPSVFLFPPKP |
| | | KDTLMISRTPEVTCVVVDVSHEDPEV |
| | | KFNWYVDGVEVHNAKTKPREEQYN |
| | | STYRVVSVLTVLHQDWLNGKEYKC |
| | | KVSNKALPAPIEKTISKAKGQPREPQ |
| | | VYTLPPSREEMTKNQVSLTCLVKGF |
| | | YPSDIAVEWESNGQPENNYKTTPPVL |
| | | DSDGSFFLYSKLTVDKSRWQQGNVF |
| | | SCSVMHEALHNHYTQKSLSLSPGK |
| 1027 | Hu anti-huCCR8 LIBC320689-1 HuIgG1z | QPKAAPSVTLFPPSSEELQANKATLV |
| | mAb_LC Constant | CLISDFYPGAVTVAWKADSSPVKAG |
| | | VETTTPSKQSNNKYAASSYLSLTPEQ |
| | | WKSHRSYSCQVTHEGSTVEKTVAPT |
| | | ECS |
| 1028 | Hu anti-huCCR8 LIBC320689-1 HuIgG1z | ASTKGPSVFPLAPSSKSTSGGTAALG |
| | mAb_HC Constant | CLVKDYFPEPVTVSWNSGALTSGVH |
| | | TFPAVLQSSGLYSLSSVVTVPSSSLGT |
| | | QTYICNVNHKPSNTKVDKKVEPKSC |
| | | DKTHTCPPCPAPELLGGPSVFLFPPKP |
| | | KDTLMISRTPEVTCVVVDVSHEDPEV |
| | | KFNWYVDGVEVHNAKTKPREEQYN |
| | | STYRVVSVLTVLHQDWLNGKEYKC |
| | | KVSNKALPAPIEKTISKAKGQPREPQ |
| | | VYTLPPSREEMTKNQVSLTCLVKGF |
| | | YPSDIAVEWESNGQPENNYKTTPPVL |
| | | DSDGSFFLYSKLTVDKSRWQQGNVF |
| | | SCSVMHEALHNHYTQKSLSLSPGK |
| 1029 | Hu anti-huCCR8 LIBC321408-1 HuIgG1z | QPKAAPSVTLFPPSSEELQANKATLV |
| | mAb_LC Constant | CLISDFYPGAVTVAWKADSSPVKAG |
| | | VETTTPSKQSNNKYAASSYLSLTPEQ |
| | | WKSHRSYSCQVTHEGSTVEKTVAPT |
| | | ECS |
| 1030 | Hu anti-huCCR8 LIBC321408-1 HuIgG1z | ASTKGPSVFPLAPSSKSTSGGTAALG |
| | mAb_HC Constant | CLVKDYFPEPVTVSWNSGALTSGVH |
| | | TFPAVLQSSGLYSLSSVVTVPSSSLGT |
| | | QTYICNVNHKPSNTKVDKKVEPKSC |
| | | DKTHTCPPCPAPELLGGPSVFLFPPKP |
| | | KDTLMISRTPEVTCVVVDVSHEDPEV |
| | | KFNWYVDGVEVHNAKTKPREEQYN |
| | | STYRVVSVLTVLHQDWLNGKEYKC |
| | | KVSNKALPAPIEKTISKAKGQPREPQ |
| | | VYTLPPSREEMTKNQVSLTCLVKGF |
| | | YPSDIAVEWESNGQPENNYKTTPPVL |
| | | DSDGSFFLYSKLTVDKSRWQQGNVF |
| | | SCSVMHEALHNHYTQKSLSLSPGK |
| 1031 | Hu anti-huCCR8 LIBC321824-1 HuIgG1z | QPKAAPSVTLFPPSSEELQANKATLV |
| | mAb_LC Constant | CLISDFYPGAVTVAWKADSSPVKAG |
| | | VETTTPSKQSNNKYAASSYLSLTPEQ |
| | | WKSHRSYSCQVTHEGSTVEKTVAPT |
| | | ECS |
| 1032 | Hu anti-huCCR8 LIBC321824-1 HuIgG1z | ASTKGPSVFPLAPSSKSTSGGTAALG |
| | mAb_HC Constant | CLVKDYFPEPVTVSWNSGALTSGVH |
| | | TFPAVLQSSGLYSLSSVVTVPSSSLGT |
| | | QTYICNVNHKPSNTKVDKKVEPKSC |
| | | DKTHTCPPCPAPELLGGPSVFLFPPKP |
| | | KDTLMISRTPEVTCVVVDVSHEDPEV |
| | | KFNWYVDGVEVHNAKTKPREEQYN |
| | | STYRVVSVLTVLHQDWLNGKEYKC |
| | | KVSNKALPAPIEKTISKAKGQPREPQ |
| | | VYTLPPSREEMTKNQVSLTCLVKGF |
| | | YPSDIAVEWESNGQPENNYKTTPPVL |
| | | DSDGSFFLYSKLTVDKSRWQQGNVF |
| | | SCSVMHEALHNHYTQKSLSLSPGK |
| 1033 | Hu anti-huCCR8 LIBC321845-1 HuIgG1z | QPKAAPSVTLFPPSSEELQANKATLV |
| | mAb_LC Constant | CLISDFYPGAVTVAWKADSSPVKAG |
| | | VETTTPSKQSNNKYAASSYLSLTPEQ |
| | | WKSHRSYSCQVTHEGSTVEKTVAPT |
| | | ECS |
| 1034 | Hu anti-huCCR8 LIBC321845-1 HuIgG1z | ASTKGPSVFPLAPSSKSTSGGTAALG |
| | mAb_HC Constant | CLVKDYFPEPVTVSWNSGALTSGVH |
| | | TFPAVLQSSGLYSLSSVVTVPSSSLGT |
| | | QTYICNVNHKPSNTKVDKKVEPKSC |
| | | DKTHTCPPCPAPELLGGPSVFLFPPKP |
| | | KDTLMISRTPEVTCVVVDVSHEDPEV |
| | | KFNWYVDGVEVHNAKTKPREEQYN |
| | | STYRVVSVLTVLHQDWLNGKEYKC |
| | | KVSNKALPAPIEKTISKAKGQPREPQ |
| | | VYTLPPSREEMTKNQVSLTCLVKGF |
| | | YPSDIAVEWESNGQPENNYKTTPPVL |
| | | DSDGSFFLYSKLTVDKSRWQQGNVF |
| | | SCSVMHEALHNHYTQKSLSLSPGK |
| 1035 | Hu anti-huCCR8 LIBC322176-1 HuIgG1z | QPKAAPSVTLFPPSSEELQANKATLV |
| | mAb_LC Constant | CLISDFYPGAVTVAWKADSSPVKAG |
| | | VETTTPSKQSNNKYAASSYLSLTPEQ |
| | | WKSHRSYSCQVTHEGSTVEKTVAPT |
| | | ECS |
| 1036 | Hu anti-huCCR8 LIBC322176-1 HuIgG1z | ASTKGPSVFPLAPSSKSTSGGTAALG |
| | mAb_HC Constant | CLVKDYFPEPVTVSWNSGALTSGVH |
| | | TFPAVLQSSGLYSLSSVVTVPSSSLGT |
| | | QTYICNVNHKPSNTKVDKKVEPKSC |
| | | DKTHTCPPCPAPELLGGPSVFLFPPKP |
| | | KDTLMISRTPEVTCVVVDVSHEDPEV |
| | | KFNWYVDGVEVHNAKTKPREEQYN |
| | | STYRVVSVLTVLHQDWLNGKEYKC |
| | | KVSNKALPAPIEKTISKAKGQPREPQ |
| | | VYTLPPSREEMTKNQVSLTCLVKGF |
| | | YPSDIAVEWESNGQPENNYKTTPPVL |
| | | DSDGSFFLYSKLTVDKSRWQQGNVF |
| | | SCSVMHEALHNHYTQKSLSLSPGK |
| 1037 | Hu anti-huCCR8 LIBC323412-1 HuIgG1z | QPKAAPSVTLFPPSSEELQANKATLV |
| | mAb_LC Constant | CLISDFYPGAVTVAWKADSSPVKAG |
| | | VETTTPSKQSNNKYAASSYLSLTPEQ |
| | | WKSHRSYSCQVTHEGSTVEKTVAPT |
| | | ECS |
| 1038 | Hu anti-huCCR8 LIBC323412-1 HuIgG1z | ASTKGPSVFPLAPSSKSTSGGTAALG |
| | mAb_HC Constant | CLVKDYFPEPVTVSWNSGALTSGVH |
| | | TFPAVLQSSGLYSLSSVVTVPSSSLGT |
| | | QTYICNVNHKPSNTKVDKKVEPKSC |
| | | DKTHTCPPCPAPELLGGPSVFLFPPKP |
| | | KDTLMISRTPEVTCVVVDVSHEDPEV |
| | | KFNWYVDGVEVHNAKTKPREEQYN |
| | | STYRVVSVLTVLHQDWLNGKEYKC |
| | | KVSNKALPAPIEKTISKAKGQPREPQ |
| | | VYTLPPSREEMTKNQVSLTCLVKGF |
| | | YPSDIAVEWESNGQPENNYKTTPPVL |
| | | DSDGSFFLYSKLTVDKSRWQQGNVF |
| | | SCSVMHEALHNHYTQKSLSLSPGK |
| 1039 | huCCR8_32360_huIgG1z mAb_HC Constant | ASTKGPSVFPLAPSSKSTSGGTAALG |
| | | CLVKDYFPEPVTVSWNSGALTSGVH |
| | | TFPAVLQSSGLYSLSSVVTVPSSSLGT |
| | | QTYICNVNHKPSNTKVDKKVEPKSC |
| | | DKTHTCPPCPAPELLGGPSVFLFPPKP |
| | | KDTLMISRTPEVTCVVVDVSHEDPEV |
| | | KFNWYVDGVEVHNAKTKPREEQYN |
| | | STYRVVSVLTVLHQDWLNGKEYKC |
| | | KVSNKALPAPIEKTISKAKGQPREPQ |
| | | VYTLPPSREEMTKNQVSLTCLVKGF |
| | | YPSDIAVEWESNGQPENNYKTTPPVL |
| | | DSDGSFFLYSKLTVDKSRWQQGNVF |
| | | SCSVMHEALHNHYTQKSLSLSPGK |
| 1040 | huCCR8_32360_huIgG1z mAb_LC Constant | TVAAPSVFIFPPSDEQLKSGTASVVCL |
| | | LNNFYPREAKVQWKVDNALQSGNS |
| | | QESVTEQDSKDSTYSLSSTLTLSKAD |
| | | YEKHKVYACEVTHQGLSSPVTKSFN |
| | | RGEC |
| 1041 | MPK20298-A4_SCFV | QVQLVESGGGVVQPGRSLRLSCVVS |
| | | GFNFSNNGMHWVRQAPGKGLEWVA |
| | | VISNDGSNKYYADSVKGRFTISRDNS |
| | | KNTLYLQMNSLRTEDTAVYYCAKV |
| | | YYGSGIYYKNRNYYGMDVWGQGTT |
| | | VTVSSGGGGSGGGGSGGGGSSYELT |
| | | QPPSVSVALGQTARITCGGNNIGSQN |
| | | VHWYQQKPGQAPVLVIYRDSNRPSG |
| | | IPDRFSGSKSGNTATLTISRAQAGDEA |
| | | DYYCQVWDSSTVVFGGGTKLTVL |
| 1042 | MPK20299-D2_SCFV | QVQLVESGGGVVQPGRSLRLSCAAS |
| | | GFNFSNYGMHWVRQAPGKGLEWVA |
| | | VISYDGSNKYYADSVKGRFTISRDNS |
| | | KNTLYLQMNSLRAEDTAVYFCARVY |
| | | YGSGIYYKKRYYYGMDVWGQGTTV |
| | | TVSSGGGGSGGGGSGGGGSSYELTQ |
| | | PPSVSVALGQTARITCGGHNIGSKGV |
| | | HWYQQKPGQAPVLVIYRNSNRPSGIP |
| | | ERFSGSNSGNTATLTITRAQAGDEAD |
| | | YYCQVWDSSTVVFGGGTKLTVL |
| 1043 | MPK20299-F11_SCFV | QVQLVESGGGVVQPGRSLRLSCAPS |
| | | GFNFSNYGMHWVRQAPGKGLEWVA |
| | | VISYDGSNKYYADSVKGRFTISRDNS |
| | | KNTLFLQMNSLRAEDTAVYFCARVY |
| | | YGSGSYYKKRYYYGMDVWGQGTT |
| | | VTVSSGGGGSGGGGSGGGGSSYELT |
| | | QPPSVSVALGQTARITCGGNNIGSQN |
| | | VHWYQQKPGQAPVLVIYRDSNRPSG |
| | | IPERFSGSKSGNTATLTISRAQAGDEA |
| | | DYYCQVWDSSTVVFGGGTQLTVL |
| 1044 | MPK20298-H6_SCFV | QVQLVESGGGVVQPGRSLRLSCAAS |
| | | GFTFSSSGMHWVRQAPGKGLEWVA |
| | | VISYDGTNKYYADSVKGRFTISRDNS |
| | | KNTLYLQMNSLRAEDTAVYYCAKV |
| | | YYGSGIYYKNRYYYGMDVWGQGTT |
| | | VTVSSGGGGSGGGGSGGGGSSYELT |
| | | QPPSVSVALGQTARITCGGHNIGSKG |
| | | VHWYQQKPGQAPVLVIYRNSNRPSG |
| | | IPERFSGSNSGNTATLTISRAQAGDEA |
| | | DYYCQVWDSSTVVFGGGTQLTVL |
| 1045 | MPK20297-A4_SCFV | QVQLVESGGGVVQPGRSLRLSCAVS |
| | | GFNFSNYGMHWVRQVPGRGLDWVA |
| | | VISNDGSNKYYADSVKGRFTISRDNS |
| | | KNTLYLQMDSLRTEDTAVYYCAKV |
| | | YYGSGIYYKKRYYYGMDVWGQGTT |
| | | VTVSSGGGGSGGGGSGGGGSSYELT |
| | | QPPSVSVALGQTARITCGGHNIGSQN |
| | | VHWYQQKPGQAPVLVIYRDSNRPSG |
| | | IPERFSGSKSGNTATLTISRAQAGDEA |
| | | DYYCQVWDSSTVVFGGGTQLTVL |
| 1046 | MPK20299-H8_SCFV | QVQLVESGGGVVQPGRSLRLSCAAS |
| | | GFNFSNYGMHWVRQAPGKGLEWVA |
| | | VISYDGSNKYYADSVKGRFTISRDNS |
| | | KNTLYLQMNSLRAEDTAVYFCARVY |
| | | YGSGIYYKKRYYYGMDVWGQGTTV |
| | | TVSSGGGGSGGGGSGGGGSSYELTQ |
| | | PPSVSVAPGQTARITCGGNNIGSKNV |
| | | HWYQQKAGQAPVQVIYRNSNRPSGI |
| | | PARFSGSNSGNTATLTISRAQAGDEA |
| | | DYYCQVWDSSTVVFGGGTKLTVL |
| 1047 | MPK20300-C11_SCFV | QVQLVESGGGVVQPGRSLRLSCAAS |
| | | GFTFSSYGMHWVRQAPGKGLEWVA |
| | | VISYDGSNKYYADSVKGRFTISRDNS |
| | | KNTLYLQMNSLRGEDTAVYYCARV |
| | | YYGSGSYYKNRYYYGMDVWGQGT |
| | | TVTVSSGGGGSGGGGSGGGGSSYEL |
| | | TQPPSVSVAPGQTARIPCGGNNIGSK |
| | | NVHWYQQKPGQAPVLVIYRDINRPS |
| | | GIPERFSGSNSGNTATLTISRAQAGDE |
| | | ADYYCQVWDSSVVFGGGTKLTVL |
| 1048 | MPK20298-B1_SCFV | QVQLVESGGGVVQPGRSLRLSCAAS |
| | | GFNFSNYGMHWVRQAPGKGLEWVA |
| | | VISYDGSNKYYADSVKGRFTISRDNS |
| | | KNTLYLQMNSLRAEDTAVYFCARVY |
| | | YGSGIYYKKRYYYGMDVWGQGTTV |
| | | TVSSGGGGSGGGGSGGGGSSYELTQ |
| | | PPSVSVALGQTARLTCEGNNIGSKNV |
| | | HWYQQKPGQAPVLVIYRNSNRPSGIP |
| | | ERFSGSNSGNTATLTISRVQAGDEAD |
| | | YYCQAWDSSTVVFGGGTQLTVL |
| 1049 | MPK20297-E5_SCFV | QVQLVESGGGLVKPGGSLRLSCAVS |
| | | GFNFSNNGMHWVRQAPGKGLEWVA |
| | | VISYDGSNKYYTDSVKGRFTISRDNS |
| | | KNTLYLQMNSLRTEDTAVYYCAKV |
| | | YYGSGIYYKKRYYYGMDVWGQGTT |
| | | VTVSSGGGGSGGGGSGGGGSSYELT |
| | | QPLSVSEALGQTARITCGGNNIGSKN |
| | | VHWYQQKPGQAPVLVIYRDSNRPSG |
| | | IPERFSGSNSGNAATLTISRVEAGDEA |
| | | DYYCQVWDSSSDHVVFGGGTQLTV |
| | | L |
| 1050 | MPK20299-A3_SCFV | QVQLVESGGGVVQPGRSLRLSCAAS |
| | | GFNFSNYGMHWVRQAPGKGLEWVA |
| | | VISYDGSNKYYADSVKGRFTISRDNS |
| | | KNTLYLQMNSLRAEDTAVYFCARVY |
| | | YGSGIYYKKRYYYGMDVWGQGTTV |
| | | TVSSGGGGSGGGGSGGGGSSYELTQ |
| | | PPSVSVAPGQTARITCGGNNIGSKNV |
| | | HWYQQKPGQAPVLVIYRNSNRPSGIP |
| | | ERFSGSNSGNTATLTISGTQAMDEAD |
| | | YYCQAWDSSNVVFGGGTQLTVL |
| 1051 | MPK20297-B4_SCFV | QVQLVESGGGVVQPGRSLRLSCVVS |
| | | GFNFSRNGMHWVRQVPGRGLDWVA |
| | | VISNDGSNKYYADSVKGRFTISRDNS |
| | | KNTLYLQMNSLRAEDTAVYYCAKV |
| | | YYGSGIYYKNNYYYGMDVWGQGTT |
| | | VTVSSGGGGSGGGGSGGGGSSYELT |
| | | QPLSVSVALGQTARITCGGNNIGSQN |
| | | VHWYQQKPGQAPVLVIYRDSNRPSG |
| | | IPDRFSGSKSGNTATLTISRAQAGDEA |
| | | DYYCQVWDSSTVVFGGGTQLTVL |
| 1052 | MPK20298-F6_SCFV | QVQLVESGGGVVQPGRSLRLSCVVS |
| | | GFNFSRNGMHWVRQVPGRGLDWVA |
| | | VISNDGSNKYYADSVKGRFTISRDNS |
| | | KNTLYLQMNSLRAEDTAVYYCAKV |
| | | YYGSGIYYKNRYYYGMDVWGQGTT |
| | | VTVSSGGGGSGGGGSGGGGSSYELT |
| | | QPPSVSVAPGQTARITCGGNNIGSKN |
| | | VHWYQQKPGQAPVLVIYRDSNRPSG |
| | | IPERFSGSKSGTTATLTISRAQAGDEA |
| | | EYYCQVWDSSTVVFGGGTELTVL |
| 1053 | MPK20299-H3_SCFV | QVQLVESGGGVVQPGRSLRLSCAAS |
| | | GFNFSNYGMHWVRQAPGKGLEWVA |
| | | VISYDGSNKYYADSVKGRFTISRDNS |
| | | KNTLYLQMNSLRAEDTAVYFCARVY |
| | | YGSGIYYKKRYYYGMDVWGQGTTV |
| | | TVSSGGGGSGGGGSGGGGSSYELTQ |
| | | PLSVSVALGQTARITCGGNNIGSKNV |
| | | HWYQQKPGQAPVLAIYRNSNRPSGIP |
| | | ERFTGSNSGNTATLTISRAQAGDESD |
| | | YYCQIWDSSTVVFGGGTKLTVL |
| 1054 | MPK20298-B9_SCFV | QVQLVESGGGVVQPGRSLRLSCAAS |
| | | GFNFSRNGMHWVRQVPGRGLDWVA |
| | | VISNDGSNKYYADSVKGRFTISRDNS |
| | | KNTLYLQMNSLRAEDTAVYYCAKV |
| | | YYGSGIYYKKNYYYGMDVWGQGTT |
| | | VTVSSGGGGSGGGGSGGGGSSYELT |
| | | QPPSVSVALGQTARISCGGNNIGSKN |
| | | VHWYQQKPGQAPVLVIYRDSNRPSG |
| | | IPERFSGSKSGTTATLTISRAQAGDEA |
| | | EYYCQVWDSSTVVFGGGTQLTVL |
| 1055 | MPK20299-E2_SCFV | QVQLVESGGGVVQPGRSLRLSCAVS |
| | | GFNFSNNGMHWVRQAPGKGLEWVA |
| | | VISYDGSNKYYTDSVKGRFTISRDNS |
| | | KNTLYLQMNSLRTEDTAVYYCAKV |
| | | YYGSGIYYKKRYYYGMDVWGQGTT |
| | | VTVSSGGGGSGGGGSGGGGSSYELT |
| | | QPPSVSVALGQTARITCEGNNIGSQN |
| | | VHWYQQKPGQAPVLVMYRDSNRPS |
| | | GIPERFSGSKSGNTATLAISRAQAGDE |
| | | SDYYCQVWDGSAVVFGGGTKLTVL |
| 1056 | MPK20299-D6_SCFV | QVQLVESGGGVVQPGRSLRLSCAAS |
| | | GFTFSSYGMHWVRQAPGKGLEWVA |
| | | VISYDGSNKYYADSVKGRFTISRDNS |
| | | KNTLYLQMNSLRAEDTAVYFCARVY |
| | | YGSGIYYKKRYYYGMDVWGQGTTV |
| | | TVSSGGGGSGGGGSGGGGSSYELTQ |
| | | PLSVSVALGQTARITCEGNNIGSQNV |
| | | HWYQQKPGQAPVLVMYRDSNRPSGI |
| | | PERFSGSKSGNTATLAISRAQAGDES |
| | | DYYCQVWDGSAVVFGGGTQLTVL |
| 1057 | MPK20299-A4_SCFV | QVQLVESGGGVVQPGRSLRLSCAAS |
| | | GFTFSNYGFHWVRQTPGKGLEWVA |
| | | VISYDGSNRYYADSVKGRFTISRDNS |
| | | KNTLYLQMNSLRGEDTALYYCARV |
| | | YYGSGTYYKNRYYYGMDVWGQGT |
| | | TVTVSSGGGGSGGGGSGGGGSSYEL |
| | | TQPPSVSVALGQTARITCGGHNIGSK |
| | | GVHWYQQKPGQAPVLVIYRNSNRPS |
| | | GIPERFSGSNSGNTATLTISGTQAMDE |
| | | ADYYCQAWDSGTVVFGGGTQLTVL |
| 1058 | MPK20300-G5_SCFV | QVQLVESGGGVVQPGRSLRLSCAAS |
| | | GFTFSNYGFHWVRQTPGKGLEWVA |
| | | VISYDGSNRYYADSVKGRFTISRDNS |
| | | KNTLYLQMNSLRGEDTALYYCARV |
| | | YYGSGTYYKNRYYYGMDVWGQGT |
| | | TVTVSSGGGGSGGGGSGGGGSSYEL |
| | | TQPPSVSVALGQTARITCGANNIGSK |
| | | NVHWYQQKPGQPPVLVIYRDFNRPS |
| | | GIPERFSASNSGNTATLTISRGQAGDE |
| | | ADYYCQVWDSSTGNVVFGGGTKLT |
| | | VL |
| 1059 | MPK20299-C3_SCFV | QVQLVESGGGVVQPGRSLRLSCAAS |
| | | GFIFSNYGFHWVRQTPGKGLEWVAV |
| | | ISYDGSNKYYADSVKGRFTISRDNSK |
| | | NTLYLQMNSLRGEDTAVYYCARVY |
| | | YGSGSYYKNRYYYGMDVWGQGTT |
| | | VTVSSGGGGSGGGGSGGGGSSYELT |
| | | QPPSVSVAPGQTARITCGGNNIGSKN |
| | | VHWYQQKPGQAPVLVIYRDSNRPSG |
| | | IPERFSGSKSGTTATLTISRAQAGDEA |
| | | DYYCQVWDSSTVVFGGGTELTVL |
| 1060 | MPK20299-B7_SCFV | QVQLVESGGGVVQPGRSLRLSCAAS |
| | | GFNFSNYGMHWVRQAPGKGLEWVA |
| | | VISYDGSNKYYADSVKGRFTISRDNS |
| | | KNTLYLQMNSLRAEDTAVYFCARVY |
| | | YGSGIYYKKRYYYGMDVWGQGTTV |
| | | TVSSGGGGSGGGGSGGGGSSYELTQ |
| | | SSSVSVAPGQTARITCGGNNIGSKNV |
| | | HWYQQKPGQAPVLVIYRDSNRPSGIP |
| | | ERFSGSKSGTTATLTISRVEAGDEAD |
| | | YYCQVWDSSSAHVIFGGGTKLTVL |
| 1061 | MPK20299-A5_SCFV | QVQLVESGGGVVQPGRSLRLSCGAS |
| | | GFTFSGYGMHWVRQAPGKGLEWVA |
| | | VISYDGSNKYYADSVKGRFTISRDNS |
| | | KNTLYLQMNSLRGEDTAVYYCARV |
| | | YYGSGIYYKNRYYYGMDVWGQGTT |
| | | VTVSSGGGGSGGGGSGGGGSSYELT |
| | | QPPSGSVALGQTARITCGGNNLGSKN |
| | | VHWYQQKPGQAPVLVIYRNSNRPSG |
| | | IPERFSGSNSGNTATLTISRAQAGDEA |
| | | DYYCQVWDSSTVVFGGGTKLTVL |
| 1062 | MPK20299-D1_SCFV | QVQLVESGGGLVKPGGSLRLSCAAS |
| | | GFTFSNNGMHWVRQAPGKGLEWVA |
| | | VISYDGSNKYYADSVKGRFTISRDNS |
| | | KNTLYLQMNSLRAEDTAVYYCAKV |
| | | YYGSGIYYKNRYYYGMDVWGQGTT |
| | | VTVSSGGGGSGGGGSGGGGSSYELT |
| | | QPPSVSVALGQTARITCGGNRIGSKN |
| | | VHWYQQKPGQAPVLVIYRDSNRPSG |
| | | IPERFSGSKSGTTATLTISRAQAGDEA |
| | | EYYCQVWDSSTVVFGGGTKLTVL |
| 1063 | MPK20299-C5_SCFV | QVQLVESGGGVVQPGRSLRLSCAAS |
| | | GFTFSNYGFHWVRQTPGKGLEWVA |
| | | VISYDGSNRYYADSVKGRFTISRDNS |
| | | KNTLYLQMNSLRGEDTALYYCARV |
| | | YYGSGTYYKNRYYYGMDVWGQGT |
| | | TVTVSSGGGGSGGGGSGGGGSSYEL |
| | | TQLPSVSVALGQTARITCGGHNIGSK |
| | | GVHWYQQKPGQAPVLVIYRNSNRPS |
| | | GIPERFSGSNSGNTATLTISRAQAGDE |
| | | ADYYCQVWDSSTVVFGGGTELTVL |
| 1064 | MPK20299-B5_SCFV | QVQLVESGGGVVQPGRSLRLSCAAS |
| | | GFNFSNYGMHWVRQAPGKGLEWVA |
| | | VISYDGSNKYYADSVKGRFTISRDNS |
| | | KNTLYLQMNSLRAEDTAVYFCARVY |
| | | YGSGIYYKNRYYYGMDVWGQGTTV |
| | | TVSSGGGGSGGGGSGGGGSSYELTQ |
| | | PPSVSVALGQTARITCGGHNIGSKGV |
| | | HWYQQKPGQAPVLVIYRNSNRPSGIP |
| | | ERFSGSNSGNTATLTISRAQAGDEAD |
| | | YYCQVWDSSTVVFGGGTQLTVL |
| 1065 | MPK20299-G9_SCFV | QVQLVESGGDLVQPGRSLRLSCAAS |
| | | GFTFSNNGMHWVRQAPGKGLEWVA |
| | | VISNDGSNKYYADSVRGRFTISRDNS |
| | | KNTLYLQMNSLRAEDTAVYYCAKV |
| | | YYGSGIYYKNRYYYGMDVWGQGTT |
| | | VTVSSGGGGSGGGGSGGGGSSYELT |
| | | QPLSVSVALGQTARITCGGNNIGSKN |
| | | VHWYQQKPGQAPVLVIYRNSNRPSG |
| | | IPERFSGSNSGNTATLTLSRVQAGDE |
| | | ADYYCQVWDSSTVVFGGGTKLTVL |
| 1066 | MPK20299-G5_SCFV | QVQLVESGGGVVQPGRSLRLSCAVS |
| | | GFNFSNNGMHWVRQAPGKGLEWVA |
| | | VISNDGSNKYYADSVRGRFTISRDNS |
| | | KNTLYLQMDSLRTEDTAVYYCAKV |
| | | YYGSGIYYKNRYYYGMDVWGQGTT |
| | | VTVSSGGGGSGGGGSGGGGSSYELT |
| | | QPPSVSVALGQTARLTCEGNNIGSKN |
| | | VHWYQQKPGQAPVLVIYRDSNRPSG |
| | | IPERFSGSKSGNTATLAISRAQAGDES |
| | | DYYCQVWDSSAVVFGGGTKLTVL |
| 1067 | MPK20298-C10_SCFV | QVQLVESGGGVVQPGRSLRLSCAAS |
| | | GFTFSSSGMHWVRQAPGKGLEWVA |
| | | VISNDGSNKYYADSVKGRFTISRDNS |
| | | KNTLYLQMNSLRAEDTAVYYCAKV |
| | | YYGSGIYYKNNYYYGMDVWGQGTT |
| | | VTVSSGGGGGGGGSGGGGSSYELT |
| | | QPPSVSVALGQTARITCGGNNIGSKN |
| | | VHWYQQKPGQAPVLAIYRNSNRPSG |
| | | IPERFTGSNSGNTATLTISGTQAMDE |
| | | ADYYCQAWDSSTVVFGGGTKLTVL |
| 1068 | MPK20298-B5_SCFV | QVQLVESGGGVVQPGRSLRLSCAAS |
| | | GFNFSNYGMHWVRQAPGKGLEWVA |
| | | VISYDGSNKYYADSVKGRFTISRDNS |
| | | KNTLYLQMNSLRAEDTAVYFCARVY |
| | | YGSGIYYKKRYYYGMDVWGQGTTV |
| | | TVSSGGGGSGGGGSGGGGSSYELTQ |
| | | PPSVSVALGQTARITCGGNNIGSQNV |
| | | HWYQQKPGQAPVLVIYRDSNRPSGIP |
| | | ERFSGSKSGNTATLAISRAQAGDESD |
| | | YYCQVWDSSAVVFGGGTQLTVL |
| 1069 | MPK20299-F2_SCFV | QVQLVESGGGVVQPGRSLRLSCAAS |
| | | GFTLSSSGMHWVRQAPGKGLEWVA |
| | | VISNDGSNKYYADSVKGRFTISRDDS |
| | | KNTLYLQMDSLRTEDTAVYYCAKV |
| | | YYGSGIYYKNRYYYGMDVWGQGTT |
| | | VTVSSGGGGSGGGGSGGGGSSYELT |
| | | QPPSVSVALGQTARISCGGNNIGSKN |
| | | VHWYQQKPGQAPVLVMYRDSNRPS |
| | | GIPERFSGSNSGNTATLTISGTQAMDE |
| | | ADYYCQAWDSGTVVFGGGTKLTVL |
| 1070 | MPK20298-D4_SCFV | QVQLVESGGGVVQPGRSLRLSCAAS |
| | | GFNFSNYGMHWVRQAPGKGLEWVA |
| | | VISYDGSNKYYADSVKGRFTISRDNS |
| | | KNTLYLQMNSLRAEDTAVYFCARVY |
| | | YGSGIYYKKRYYYGMDVWGQGTTV |
| | | TVSSGGGGSGGGGSGGGGSSYELTQ |
| | | PPSVSVALGQTARITCGGNNIGGKNV |
| | | HWYQQKPGQAPVLVIYRDSNRPSGIP |
| | | ERFSGSKSGNTATLTISRAQAGDESD |
| | | YYCQVWDSSTVVFGGGTQLTVL |
| 1071 | MPK20297-F5_SCFV | QVQLVESGGGVVQPGRSLRLSCVVS |
| | | GFNFSRNGMHWVRQVPGRGLDWVA |
| | | VISNDGSNKYYADSVKGRFTISRDNS |
| | | KNTLYLQMNSLRAEDTAVYYCAKV |
| | | YYGSGIYYKNNYYYGMDVWGQGTT |
| | | VTVSSGGGGSGGGGSGGGGSSYELT |
| | | QPLSVSVALGQTARITCGGNNIGSKN |
| | | VHWYQQKPGQAPVLVIYRNSNRPSG |
| | | IPERFSGSNSGNTATLTISRAQAGDEA |
| | | DYYCQVWDSSTVVFGGGTKLTVL |
| 1072 | MPK20299-D9_SCFV | QVQLVESGGGLVKPGGSLRLSCAAS |
| | | GFNFSRNGMHWVRQVPGRGLDWVA |
| | | VISNDGSNKYYADSVKGRFTISRDNS |
| | | KNTLYLQMNSLRAEDTAVYYCAKV |
| | | YYGSGIYYKNNYYYGMDVWGQGTT |
| | | VTVSSGGGGSGGGGSGGGGSSYELT |
| | | QPPSVSVALGQTARISCGGNNIESKN |
| | | VHWYQQKPGQAPVLVIYRDSNRPSG |
| | | IPERFSGSKSGTTATLTISRAQAGDEA |
| | | EYYCQVWDSSTVVFGGGTQLTVL |
| 1073 | huCCR8_32360_huIgG1z | EVQLVESGGGLVKPGGSLRLSCAAS |
| | mAb(LC: K38R)_HC | GFTFSNARMGWVRQAPGKGLEWVG |
| | | RIKSKTEGGTRDYAAPVKGRFTISRD |
| | | DSKNTLYLQMNSLKTEDTAVYYCTS |
| | | YSGVWGQGTMVTVSSASTKGPSVFP |
| | | LAPSSKSTSGGTAALGCLVKDYFPEP |
| | | VTVSWNSGALTSGVHTFPAVLQSSG |
| | | LYSLSSVVTVPSSSLGTQTYICNVNH |
| | | KPSNTKVDKKVEPKSCDKTHTCPPCP |
| | | APELLGGPSVFLFPPKPKDTLMISRTP |
| | | EVTCVVVDVSHEDPEVKFNWYVDG |
| | | VEVHNAKTKPREEQYNSTYRVVSVL |
| | | TVLHQDWLNGKEYKCKVSNKALPA |
| | | PIEKTISKAKGQPREPQVYTLPPSREE |
| | | MTKNQVSLTCLVKGFYPSDIAVEWE |
| | | SNGQPENNYKTTPPVLDSDGSFFLYS |
| | | KLTVDKSRWQQGNVFSCSVMHEAL |
| | | HNHYTQKSLSLSPGK |
| 1074 | huCCR8_32360_huIgG1z | DIVMTQSPDSLAVSLGERATINCKSS |
| | mAb(LC: K38R)_LC | QSVLYSSNNRNYLAWYHQKPGQSPK |
| | | LLISWASTRESGVPDRFSGSGSGTDFT |
| | | LTINSLQAEDVAVYYCQQYYSIPITFG |
| | | GGTKVEIKRTVAAPSVFIFPPSDEQLK |
| | | SGTASVVCLLNNFYPREAKVQWKVD |
| | | NALQSGNSQESVTEQDSKDSTYSLSS |
| | | TLTLSKADYEKHKVYACEVTHQGLS |
| | | SPVTKSFNRGEC |
| 1075 | anti- | QVQLVESGGGVVQPGRSLRLSCAAS |
| | huCCR8_44379(VH: D72S, VL: N67A_S68A_ | GFTFSNYGFHWVRQTPGKGLEWVA |
| | M99G_W109F_S111A)_huIgG1z (mAb)_HC | VISYDGSNRYYASSVKGRFTISRDNS |
| | | KNTLYLQMNSLRGEDTALYYCARV |
| | | YYGSGTYYKNRYYYGMDVWGQGT |
| | | TVTVSSASTKGPSVFPLAPSSKSTSGG |
| | | TAALGCLVKDYFPEPVTVSWNSGAL |
| | | TSGVHTFPAVLQSSGLYSLSSVVTVP |
| | | SSSLGTQTYICNVNHKPSNTKVDKKV |
| | | EPKSCDKTHTCPPCPAPELLGGPSVFL |
| | | FPPKPKDTLMISRTPEVTCVVVDVSH |
| | | EDPEVKFNWYVDGVEVHNAKTKPR |
| | | EEQYNSTYRVVSVLTVLHQDWLNG |
| | | KEYKCKVSNKALPAPIEKTISKAKGQ |
| | | PREPQVYTLPPSREEMTKNQVSLTCL |
| | | VKGFYPSDIAVEWESNGQPENNYKT |
| | | TPPVLDSDGSFFLYSKLTVDKSRWQQ |
| | | GNVFSCSVMHEALHNHYTQKSLSLS |
| | | PGK |
| 1076 | anti- | SYELTQPPSVSVALGQTARITCGGHN |
| | huCCR8_44379(VH: D72S, VL: N67A_S68A_ | IGSKGVHWYQQKPGQAPVLVIYRAA |
| | M99G_W109F_S111A)_huIgG1z (mAb)_LC | NRPSGIPERFSGSNSGNTATLTISGTQ |
| | | AGDEADYYCQAFDAGTVVFGGGTQ |
| | | LTVLGQPKAAPSVTLFPPSSEELQAN |
| | | KATLVCLISDFYPGAVTVAWKADSS |
| | | PVKAGVETTTPSKQSNNKYAASSYLS |
| | | LTPEQWKSHRSYSCQVTHEGSTVEK |
| | | TVAPTECS |
| 1077 | anti- | QVQLVESGGGVVQPGRSLRLSCAAS |
| | huCCR8_44379(VH: D61A_D72A, VL: N67Q_ | GFTFSNYGFHWVRQTPGKGLEWVA |
| | M99E_W109F_S111A)_huIgG1z | VISYAGSNRYYAASVKGRFTISRDNS |
| | (mAb) HC | KNTLYLQMNSLRGEDTALYYCARV |
| | | YYGSGTYYKNRYYYGMDVWGQGT |
| | | TVTVSSASTKGPSVFPLAPSSKSTSGG |
| | | TAALGCLVKDYFPEPVTVSWNSGAL |
| | | TSGVHTFPAVLQSSGLYSLSSVVTVP |
| | | SSSLGTQTYICNVNHKPSNTKVDKKV |
| | | EPKSCDKTHTCPPCPAPELLGGPSVFL |
| | | FPPKPKDTLMISRTPEVTCVVVDVSH |
| | | EDPEVKFNWYVDGVEVHNAKTKPR |
| | | EEQYNSTYRVVSVLTVLHQDWLNG |
| | | KEYKCKVSNKALPAPIEKTISKAKGQ |
| | | PREPQVYTLPPSREEMTKNQVSLTCL |
| | | VKGFYPSDIAVEWESNGQPENNYKT |
| | | TPPVLDSDGSFFLYSKLTVDKSRWQQ |
| | | GNVFSCSVMHEALHNHYTQKSLSLS |
| | | PGK |
| 1078 | anti- | SYELTQPPSVSVALGQTARITCGGHN |
| | huCCR8_44379(VH: D61A_D72A, VL: N67Q_ | IGSKGVHWYQQKPGQAPVLVIYRQS |
| | M99E_W109F_S111A)_huIgG1z | NRPSGIPERFSGSNSGNTATLTISGTQ |
| | (mAb)_LC | AEDEADYYCQAFDAGTVVFGGGTQ |
| | | LTVLGQPKAAPSVTLFPPSSEELQAN |
| | | KATLVCLISDFYPGAVTVAWKADSS |
| | | PVKAGVETTTPSKQSNNKYAASSYLS |
| | | LTPEQWKSHRSYSCQVTHEGSTVEK |
| | | TVAPTECS |
| 1079 | anti- | QVQLVESGGGVVQPGRSLRLSCAAS |
| | huCCR8_44379(VH: D61S, VL: N67Q_M99G | GFTFSNYGFHWVRQTPGKGLEWVA |
| | _W109F_S111A)_huIgG1z (mAb)_HC | VISYSGSNRYYADSVKGRFTISRDNS |
| | | KNTLYLQMNSLRGEDTALYYCARV |
| | | YYGSGTYYKNRYYYGMDVWGQGT |
| | | TVTVSSASTKGPSVFPLAPSSKSTSGG |
| | | TAALGCLVKDYFPEPVTVSWNSGAL |
| | | TSGVHTFPAVLQSSGLYSLSSVVTVP |
| | | SSSLGTQTYICNVNHKPSNTKVDKKV |
| | | EPKSCDKTHTCPPCPAPELLGGPSVFL |
| | | FPPKPKDTLMISRTPEVTCVVVDVSH |
| | | EDPEVKFNWYVDGVEVHNAKTKPR |
| | | EEQYNSTYRVVSVLTVLHQDWLNG |
| | | KEYKCKVSNKALPAPIEKTISKAKGQ |
| | | PREPQVYTLPPSREEMTKNQVSLTCL |
| | | VKGFYPSDIAVEWESNGQPENNYKT |
| | | TPPVLDSDGSFFLYSKLTVDKSRWQQ |
| | | GNVFSCSVMHEALHNHYTQKSLSLS |
| | | PGK |
| 1080 | anti- | SYELTQPPSVSVALGQTARITCGGHN |
| | huCCR8_44379(VH: D61S, VL: N67Q_M99G | IGSKGVHWYQQKPGQAPVLVIYRQS |
| | _W109F_S111A)_huIgG1z (mAb)_LC | NRPSGIPERFSGSNSGNTATLTISGTQ |
| | | AGDEADYYCQAFDAGTVVFGGGTQ |
| | | LTVLGQPKAAPSVTLFPPSSEELQAN |
| | | KATLVCLISDFYPGAVTVAWKADSS |
| | | PVKAGVETTTPSKQSNNKYAASSYLS |
| | | LTPEQWKSHRSYSCQVTHEGSTVEK |
| | | TVAPTECS |
| 1081 | Hu anti-huCCR8 LIBC315615-1 HuIgG1z | SYELTQPLSVSVALGQTARITCGGHN |
| | mAb_LC | IGSKGVHWYQQKPGQAPVLVIYRNS |
| | | NRPSGIPERFSGSNSGNTATLTISRAQ |
| | | AGDEADYYCQVWDISTVVFGGGTEL |
| | | TVLGQPKAAPSVTLFPPSSEELQANK |
| | | ATLVCLISDFYPGAVTVAWKADSSP |
| | | VKAGVETTTPSKQSNNKYAASSYLS |
| | | LTPEQWKSHRSYSCQVTHEGSTVEK |
| | | TVAPTECS |
| 1082 | Hu anti-huCCR8 LIBC315615-1 HuIgG1z | QVQLVESGGGVAQPGRSLRLSCAAS |
| | mAb_HC | GFNFSNCGMHWVRQAPGKGLEWVA |
| | | VISYDGGNKYHADSVKGRFTISRDDS |
| | | KNTLYLQMDSLRTEDTAVYYCAKV |
| | | YYGSGIYYKNRYYYGMDVWGQGTT |
| | | VTVSSASTKGPSVFPLAPSSKSTSGGT |
| | | AALGCLVKDYFPEPVTVSWNSGALT |
| | | SGVHTFPAVLQSSGLYSLSSVVTVPS |
| | | SSLGTQTYICNVNHKPSNTKVDKKV |
| | | EPKSCDKTHTCPPCPAPELLGGPSVFL |
| | | FPPKPKDTLMISRTPEVTCVVVDVSH |
| | | EDPEVKFNWYVDGVEVHNAKTKPR |
| | | EEQYNSTYRVVSVLTVLHQDWLNG |
| | | KEYKCKVSNKALPAPIEKTISKAKGQ |
| | | PREPQVYTLPPSREEMTKNQVSLTCL |
| | | VKGFYPSDIAVEWESNGQPENNYKT |
| | | TPPVLDSDGSFFLYSKLTVDKSRWQQ |
| | | GNVFSCSVMHEALHNHYTQKSLSLS |
| | | PGK |
| 1083 | Hu anti-huCCR8 LIBC317152-1 HuIgG1z | SYELTQPLSVSVALGQTARITCGGHN |
| | mAb_LC | IGSKGVHWYQQKPGQAPVLVIYRNS |
| | | NRPSGIPERFSGSNSGKTATLTISRAQ |
| | | AGDEADYYCQVWDSSTVVFGGGTE |
| | | LTVLGQPKAAPSVTLFPPSSEELQAN |
| | | KATLVCLISDFYPGAVTVAWKADSS |
| | | PVKAGVETTTPSKQSNNKYAASSYLS |
| | | LTPEQWKSHRSYSCQVTHEGSTVEK |
| | | TVAPTECS |
| 1084 | Hu anti-huCCR8 LIBC317152-1 HuIgG1z | QVQLVESGGGVAQPGRSLRLSCAAS |
| | mAb_HC | GFNFSNCGMHWVRQAPGKGLEWVA |
| | | VISYDGGNKYYADSVKGRFTISRDDS |
| | | KNTLYLQMDSLRTEDTAVYYCAKV |
| | | YYGSGIYYKNRYYYGMDVWGQGTT |
| | | VTVSSASTKGPSVFPLAPSSKSTSGGT |
| | | AALGCLVKDYFPEPVTVSWNSGALT |
| | | SGVHTFPAVLQSSGLYSLSSVVTVPS |
| | | SSLGTQTYICNVNHKPSNTKVDKKV |
| | | EPKSCDKTHTCPPCPAPELLGGPSVFL |
| | | FPPKPKDTLMISRTPEVTCVVVDVSH |
| | | EDPEVKFNWYVDGVEVHNAKTKPR |
| | | EEQYNSTYRVVSVLTVLHQDWLNG |
| | | KEYKCKVSNKALPAPIEKTISKAKGQ |
| | | PREPQVYTLPPSREEMTKNQVSLTCL |
| | | VKGFYPSDIAVEWESNGQPENNYKT |
| | | TPPVLDSDGSFFLYSKLTVDKSRWQQ |
| | | GNVFSCSVMHEALHNHYTQKSLSLS |
| | | PGK |
| 1085 | Hu anti-huCCR8 LIBC317471-1 HuIgG1z | SYELTQPLSVSVALGQTARITCGGNN |
| | mAb_LC | IGSKNVHWYQKRPGQAPVLVIYRDS |
| | | NRPSGIPERFSGSKSGNTATLTISRAQ |
| | | AGDEADYYCQVWDSNTVVFGGGTN |
| | | LTVLGQPKAAPSVTLFPPSSEELQAN |
| | | KATLVCLISDFYPGAVTVAWKADSS |
| | | PVKAGVETTTPSKQSNNKYAASSYLS |
| | | LTPEQWKSHRSYSCQVTHEGSTVEK |
| | | TVAPTECS |
| 1086 | Hu anti-huCCR8 LIBC317471-1 HuIgG1z | QVQLVESGGGVVQPGRSLRLSCVVS |
| | mAb_HC | GFNFSNNGMHWVRQAPGKGLEWVA |
| | | VISNDGSNKYYADSVRGRFTISRDNS |
| | | KNTLYLQMNSLRAEDTAVYSCAKV |
| | | YYGSGIYYKNNYYYGMDVWGQGTT |
| | | VTVSSASTKGPSVFPLAPSSKSTSGGT |
| | | AALGCLVKDYFPEPVTVSWNSGALT |
| | | SGVHTFPAVLQSSGLYSLSSVVTVPS |
| | | SSLGTQTYICNVNHKPSNTKVDKKV |
| | | EPKSCDKTHTCPPCPAPELLGGPSVFL |
| | | FPPKPKDTLMISRTPEVTCVVVDVSH |
| | | EDPEVKFNWYVDGVEVHNAKTKPR |
| | | EEQYNSTYRVVSVLTVLHQDWLNG |
| | | KEYKCKVSNKALPAPIEKTISKAKGQ |
| | | PREPQVYTLPPSREEMTKNQVSLTCL |
| | | VKGFYPSDIAVEWESNGQPENNYKT |
| | | TPPVLDSDGSFFLYSKLTVDKSRWQQ |
| | | GNVFSCSVMHEALHNHYTQKSLSLS |
| | | PGK |
| 1087 | Hu anti-huCCR8 LIBC317977-1 HuIgG1z | SYELTQPLSVSVALGQTARITCGGNN |
| | mAb_LC | IGSKNVHWYQQKAGQAPVQVIYRNS |
| | | NRPSGIPERFSGSNSGNTATLTISRAQ |
| | | AGDEADYYCQVWDSSTVVFGGGTK |
| | | LTVLGQPKAAPSVTLFPPSSEELQAN |
| | | KATLVCLISDFYPGAVTVAWKADSS |
| | | PVKAGVETTTPSKQSNNKYAASSYLS |
| | | LTPEQWKSHRSYSCQVTHEGSTVEK |
| | | TVAPTECS |
| 1088 | Hu anti-huCCR8 LIBC317977-1 HuIgG1z | QVQLVESGGGVVQPGRSLRLSCAAS |
| | mAb_HC | GFNFNTYGMHWVRQAPGKGLEWVA |
| | | VISYDGSNKYYADSVKGRFTISRDNS |
| | | KSTLYLQMNSLRAEDTAVYYCARVY |
| | | YGSGSYYKKNYYYGMDVWGQGTT |
| | | VTVSSASTKGPSVFPLAPSSKSTSGGT |
| | | AALGCLVKDYFPEPVTVSWNSGALT |
| | | SGVHTFPAVLQSSGLYSLSSVVTVPS |
| | | SSLGTQTYICNVNHKPSNTKVDKKV |
| | | EPKSCDKTHTCPPCPAPELLGGPSVFL |
| | | FPPKPKDTLMISRTPEVTCVVVDVSH |
| | | EDPEVKFNWYVDGVEVHNAKTKPR |
| | | EEQYNSTYRVVSVLTVLHQDWLNG |
| | | KEYKCKVSNKALPAPIEKTISKAKGQ |
| | | PREPQVYTLPPSREEMTKNQVSLTCL |
| | | VKGFYPSDIAVEWESNGQPENNYKT |
| | | TPPVLDSDGSFFLYSKLTVDKSRWQQ |
| | | GNVFSCSVMHEALHNHYTQKSLSLS |
| | | PGK |
| 1089 | Hu anti-huCCR8 LIBC318774-1 HuIgG1z | SYELTQPLSVSVALGQTARITCGGNN |
| | mAb_LC | IGGKNVHWYQQKPGQAPVLVIYRDS |
| | | NRPSGIPERFSGSKSGNTATLTISRAQ |
| | | AGDESDYYCQVWDSSTVVFGGGTTL |
| | | TVLGQPKAAPSVTLFPPSSEELQANK |
| | | ATLVCLISDFYPGAVTVAWKADSSP |
| | | VKAGVETTTPSKQSNNKYAASSYLS |
| | | LTPEQWKSHRSYSCQVTHEGSTVEK |
| | | TVAPTECS |
| 1090 | Hu anti-huCCR8 LIBC318774-1 HuIgG1z | QVQVVESGGGVVQPGRSLRLSCAAS |
| | mAb_HC | GFTLSSYGFHWVRQTPGKGLEWVAV |
| | | ISYDGSNKYYADSVKGRFTISRDNSK |
| | | NTLYLQMNSLRGEDTAVYYCARVY |
| | | YGSGTYYKNRYYYGMDVWGQGTT |
| | | VTVSSASTKGPSVFPLAPSSKSTSGGT |
| | | AALGCLVKDYFPEPVTVSWNSGALT |
| | | SGVHTFPAVLQSSGLYSLSSVVTVPS |
| | | SSLGTQTYICNVNHKPSNTKVDKKV |
| | | EPKSCDKTHTCPPCPAPELLGGPSVFL |
| | | FPPKPKDTLMISRTPEVTCVVVDVSH |
| | | EDPEVKFNWYVDGVEVHNAKTKPR |
| | | EEQYNSTYRVVSVLTVLHQDWLNG |
| | | KEYKCKVSNKALPAPIEKTISKAKGQ |
| | | PREPQVYTLPPSREEMTKNQVSLTCL |
| | | VKGFYPSDIAVEWESNGQPENNYKT |
| | | TPPVLDSDGSFFLYSKLTVDKSRWQQ |
| | | GNVFSCSVMHEALHNHYTQKSLSLS |
| | | PGK |
| 1091 | Hu anti-huCCR8 LIBC319840-1 HuIgG1z | SYELTQPLSVSEALGQTARITCGGNNI |
| | mAb_LC | GSKNVHWYQQKPGQAPVLVIYRDSN |
| | | RPSGIPERFSGSKSGNTATLTISRAQA |
| | | GDEADYYCQVWDSSTVVFGGGTKV |
| | | TVLGQPKAAPSVTLFPPSSEELQANK |
| | | ATLVCLISDFYPGAVTVAWKADSSP |
| | | VKAGVETTTPSKQSNNKYAASSYLS |
| | | LTPEQWKSHRSYSCQVTHEGSTVEK |
| | | TVAPTECS |
| 1092 | Hu anti-huCCR8 LIBC319840-1 HuIgG1z | QVQLVESGGGVVQPGRSLRLSCVVS |
| | mAb_HC | GFNFINNGMHWVRQAPGKGLDWVA |
| | | VISNDGSNKYYPDSVKGRFTISRDNS |
| | | KNTLYLQMNSLRAEDSAVYYCAKV |
| | | YYGSGNYYKNNYYYGMDVWGQGT |
| | | TVTVSSASTKGPSVFPLAPSSKSTSGG |
| | | TAALGCLVKDYFPEPVTVSWNSGAL |
| | | TSGVHTFPAVLQSSGLYSLSSVVTVP |
| | | SSSLGTQTYICNVNHKPSNTKVDKKV |
| | | EPKSCDKTHTCPPCPAPELLGGPSVFL |
| | | FPPKPKDTLMISRTPEVTCVVVDVSH |
| | | EDPEVKFNWYVDGVEVHNAKTKPR |
| | | EEQYNSTYRVVSVLTVLHQDWLNG |
| | | KEYKCKVSNKALPAPIEKTISKAKGQ |
| | | PREPQVYTLPPSREEMTKNQVSLTCL |
| | | VKGFYPSDIAVEWESNGQPENNYKT |
| | | TPPVLDSDGSFFLYSKLTVDKSRWQQ |
| | | GNVFSCSVMHEALHNHYTQKSLSLS |
| | | PGK |
| 1093 | Hu anti-huCCR8 LIBC320212-1 HuIgG1z | SYELTQPLSVSVALGQTARITCEGNNI |
| | mAb_LC | GSQNVHWYQQKPGQAPVLVMYRDS |
| | | NRPSGIPERFSGSKSGNTATLAISRAQ |
| | | AGDESDYYCQVWDGSAVVFGGGTT |
| | | LTVLGQPKAAPSVTLFPPSSEELQAN |
| | | KATLVCLISDFYPGAVTVAWKADSS |
| | | PVKAGVETTTPSKQSNNKYAASSYLS |
| | | LTPEQWKSHRSYSCQVTHEGSTVEK |
| | | TVAPTECS |
| 1094 | Hu anti-huCCR8 LIBC320212-1 HuIgG1z | QMQVVESGGGVVQPGRSLRLSCAAS |
| | mAb_HC | GFTFSSSGMHWVRQAPGKGLEWVA |
| | | VISHDGSNKYYADSVKGRFTISRDNS |
| | | KNTLYLQMNSLGGEDTAVYYCAKV |
| | | YYGSGIYYKNRYYYGMDVWGQGTT |
| | | VIVSSASTKGPSVFPLAPSSKSTSGGT |
| | | AALGCLVKDYFPEPVTVSWNSGALT |
| | | SGVHTFPAVLQSSGLYSLSSVVTVPS |
| | | SSLGTQTYICNVNHKPSNTKVDKKV |
| | | EPKSCDKTHTCPPCPAPELLGGPSVFL |
| | | FPPKPKDTLMISRTPEVTCVVVDVSH |
| | | EDPEVKFNWYVDGVEVHNAKTKPR |
| | | EEQYNSTYRVVSVLTVLHQDWLNG |
| | | KEYKCKVSNKALPAPIEKTISKAKGQ |
| | | PREPQVYTLPPSREEMTKNQVSLTCL |
| | | VKGFYPSDIAVEWESNGQPENNYKT |
| | | TPPVLDSDGSFFLYSKLTVDKSRWQQ |
| | | GNVFSCSVMHEALHNHYTQKSLSLS |
| | | PGK |
| 1095 | Hu anti-huCCR8 LIBC320384-1 HuIgG1z | SYELTQPLSVSVALGQTARITCGGHN |
| | mAb_LC | IGSKGVHWYQQKPGQAPVLVIYRNS |
| | | NRPSGIPERFSGSNSGNTATLTISRAQ |
| | | AGDEADYYCQVWDSSTVVFGGGTE |
| | | LTVLGQPKAAPSVTLFPPSSEELQAN |
| | | KATLVCLISDFYPGAVTVAWKADSS |
| | | PVKAGVETTTPSKQSNNKYAASSYLS |
| | | LTPEQWKSHRSYSCQVTHEGSTVEK |
| | | TVAPTECS |
| 1096 | Hu anti-huCCR8 LIBC320384-1 HuIgG1z | QVQLVESGGGVAQPGRSLRLSCAAS |
| | mAb_HC | GFNFSDCGMHWVRQAPGKGLEWVA |
| | | VISYDGGNKYYADSVKGRFTISRDDS |
| | | KNTLYLQTDSLRTEDTAVYYCAKVY |
| | | YGSGIYYKNRYYYGMDVWGQGTTV |
| | | TVSSASTKGPSVFPLAPSSKSTSGGTA |
| | | ALGCLVKDYFPEPVTVSWNSGALTS |
| | | GVHTFPAVLQSSGLYSLSSVVTVPSS |
| | | SLGTQTYICNVNHKPSNTKVDKKVE |
| | | PKSCDKTHTCPPCPAPELLGGPSVFLF |
| | | PPKPKDTLMISRTPEVTCVVVDVSHE |
| | | DPEVKFNWYVDGVEVHNAKTKPRE |
| | | EQYNSTYRVVSVLTVLHQDWLNGK |
| | | EYKCKVSNKALPAPIEKTISKAKGQP |
| | | REPQVYTLPPSREEMTKNQVSLTCLV |
| | | KGFYPSDIAVEWESNGQPENNYKTTP |
| | | PVLDSDGSFFLYSKLTVDKSRWQQG |
| | | NVFSCSVMHEALHNHYTQKSLSLSP |
| | | GK |
| 1097 | Hu anti-huCCR8 LIBC320689-1 HuIgG1z | SYELTQPLSVSVALGQTGRITCGGNN |
| | mAb_LC | IGSKNVHWYQQKPGQAPVLVIYRSS |
| | | NRPSGIPERFSGSNSGNTATLTISRAQ |
| | | AGDESDYYCQIWDSSTVVFGGGTKL |
| | | TVLGQPKAAPSVTLFPPSSEELQANK |
| | | ATLVCLISDFYPGAVTVAWKADSSP |
| | | VKAGVETTTPSKQSNNKYAASSYLS |
| | | LTPEQWKSHRSYSCQVTHEGSTVEK |
| | | TVAPTECS |
| 1098 | Hu anti-huCCR8 LIBC320689-1 HuIgG1z | QVQVVESGGGVVQPGRSLRLSCAAS |
| | mAb_HC | GFTFSSYGMHWVRQAPGKGLEWVA |
| | | VISFDGNNKYYADSVKGRFTISRDNS |
| | | KNTLYLQMNSLRGEDTAVYYCARV |
| | | YYGSGSYYKNRYYYGMDVWGQGT |
| | | TVTVSTASTKGPSVFPLAPSSKSTSGG |
| | | TAALGCLVKDYFPEPVTVSWNSGAL |
| | | TSGVHTFPAVLQSSGLYSLSSVVTVP |
| | | SSSLGTQTYICNVNHKPSNTKVDKKV |
| | | EPKSCDKTHTCPPCPAPELLGGPSVFL |
| | | FPPKPKDTLMISRTPEVTCVVVDVSH |
| | | EDPEVKFNWYVDGVEVHNAKTKPR |
| | | EEQYNSTYRVVSVLTVLHQDWLNG |
| | | KEYKCKVSNKALPAPIEKTISKAKGQ |
| | | PREPQVYTLPPSREEMTKNQVSLTCL |
| | | VKGFYPSDIAVEWESNGQPENNYKT |
| | | TPPVLDSDGSFFLYSKLTVDKSRWQQ |
| | | GNVFSCSVMHEALHNHYTQKSLSLS |
| | | PGK |
| 1099 | Hu anti-huCCR8 LIBC321408-1 HuIgG1z | SYELTQPLSVSVALGQTARITCGGNN |
| | mAb_LC | IGSKNVHWYQQRPGQAPVLVIYRDS |
| | | NRPSGIPERLSGSKAGNTATLTISRAH |
| | | AGDEADYYCQVWDSSTVVFGGGTE |
| | | LTVQGQPKAAPSVTLFPPSSEELQAN |
| | | KATLVCLISDFYPGAVTVAWKADSS |
| | | PVKAGVETTTPSKQSNNKYAASSYLS |
| | | LTPEQWKSHRSYSCQVTHEGSTVEK |
| | | TVAPTECS |
| 1100 | Hu anti-huCCR8 LIBC321408-1 HuIgG1z | QVQLVESGGGVVQPGRSLRLSCAVS |
| | mAb_HC | GFTFSSNGMHWVRQAPGKGLEWVA |
| | | VISNDGSNKYYGDSVKGRFTISRDNS |
| | | KNTLYLQMNSLRAEDTAVYYCAKV |
| | | YYGSGIYYRNNYYYGMDVWGQGTT |
| | | VTVSSASTKGPSVFPLAPSSKSTSGGT |
| | | AALGCLVKDYFPEPVTVSWNSGALT |
| | | SGVHTFPAVLQSSGLYSLSSVVTVPS |
| | | SSLGTQTYICNVNHKPSNTKVDKKV |
| | | EPKSCDKTHTCPPCPAPELLGGPSVFL |
| | | FPPKPKDTLMISRTPEVTCVVVDVSH |
| | | EDPEVKFNWYVDGVEVHNAKTKPR |
| | | EEQYNSTYRVVSVLTVLHQDWLNG |
| | | KEYKCKVSNKALPAPIEKTISKAKGQ |
| | | PREPQVYTLPPSREEMTKNQVSLTCL |
| | | VKGFYPSDIAVEWESNGQPENNYKT |
| | | TPPVLDSDGSFFLYSKLTVDKSRWQQ |
| | | GNVFSCSVMHEALHNHYTQKSLSLS |
| | | PGK |
| 1101 | Hu anti-huCCR8 LIBC321824-1 HuIgG1z | SYELTQPLSVSVALGQTARITCGGNN |
| | mAb_LC | IGSKNVHWYQQKPGQAPILVIYRNTN |
| | | RPSGIPERFSGSNSGNTATLTISRAQV |
| | | GDESDYFCQVWDSSTVVFGGGTKLT |
| | | VLGQPKAAPSVTLFPPSSEELQANKA |
| | | TLVCLISDFYPGAVTVAWKADSSPV |
| | | KAGVETTTPSKQSNNKYAASSYLSLT |
| | | PEQWKSHRSYSCQVTHEGSTVEKTV |
| | | APTECS |
| 1102 | Hu anti-huCCR8 LIBC321824-1 HuIgG1z | QVQVVESGGGVVQPGRSLRLSCGAS |
| | mAb_HC | GFTFSGYGMHWVRQAPGKGLEWVA |
| | | VISYDGSNKYYADSVKGRFPISRDNS |
| | | KNTLYLQMNSLRGEDTAVYYCARV |
| | | YYGSGIYYKNRYYYGMDVWGQGTT |
| | | VAVSSASTKGPSVFPLAPSSKSTSGGT |
| | | AALGCLVKDYFPEPVTVSWNSGALT |
| | | SGVHTFPAVLQSSGLYSLSSVVTVPS |
| | | SSLGTQTYICNVNHKPSNTKVDKKV |
| | | EPKSCDKTHTCPPCPAPELLGGPSVFL |
| | | FPPKPKDTLMISRTPEVTCVVVDVSH |
| | | EDPEVKFNWYVDGVEVHNAKTKPR |
| | | EEQYNSTYRVVSVLTVLHQDWLNG |
| | | KEYKCKVSNKALPAPIEKTISKAKGQ |
| | | PREPQVYTLPPSREEMTKNQVSLTCL |
| | | VKGFYPSDIAVEWESNGQPENNYKT |
| | | TPPVLDSDGSFFLYSKLTVDKSRWQQ |
| | | GNVFSCSVMHEALHNHYTQKSLSLS |
| | | PGK |
| 1103 | Hu anti-huCCR8 LIBC321845-1 HuIgG1z | SYELTQPLSVSVALGQTARITCGGNN |
| | mAb_LC | IGSKNVHWYQQKPGQAPILVIYRNTN |
| | | RPSGIPERFSGSNSGNTATLTISRAQV |
| | | GDESDYFCQVWDSSTVVFGGGTKLT |
| | | VLGQPKAAPSVTLFPPSSEELQANKA |
| | | TLVCLISDFYPGAVTVAWKADSSPV |
| | | KAGVETTTPSKQSNNKYAASSYLSLT |
| | | PEQWKSHRSYSCQVTHEGSTVEKTV |
| | | APTECS |
| 1104 | Hu anti-huCCR8 LIBC321845-1 HuIgG1z | QVQVVESGGGVVQPGRSLRLSCGAS |
| | mAb_HC | GFTFSGYGMHWVRQAPGKGLEWVA |
| | | VISYDGSNKYYADSVKGRFTISRDNS |
| | | KNTLYLQMNSLRGEDTAVYYCARV |
| | | YYGSGIYYKNRYYYGMDVWGQGTT |
| | | VAVSSASTKGPSVFPLAPSSKSTSGGT |
| | | AALGCLVKDYFPEPVTVSWNSGALT |
| | | SGVHTFPAVLQSSGLYSLSSVVTVPS |
| | | SSLGTQTYICNVNHKPSNTKVDKKV |
| | | EPKSCDKTHTCPPCPAPELLGGPSVFL |
| | | FPPKPKDTLMISRTPEVTCVVVDVSH |
| | | EDPEVKFNWYVDGVEVHNAKTKPR |
| | | EEQYNSTYRVVSVLTVLHQDWLNG |
| | | KEYKCKVSNKALPAPIEKTISKAKGQ |
| | | PREPQVYTLPPSREEMTKNQVSLTCL |
| | | VKGFYPSDIAVEWESNGQPENNYKT |
| | | TPPVLDSDGSFFLYSKLTVDKSRWQQ |
| | | GNVFSCSVMHEALHNHYTQKSLSLS |
| | | PGK |
| 1105 | Hu anti-huCCR8 LIBC322176-1 HuIgG1z | SYDLTQPLSVSVALGQTARITCGGNN |
| | mAb_LC | IGDKNVHWYQQKPGQAPVLVIYRNN |
| | | VRPSGIPERFSGSNSGNTATLTISRAQ |
| | | AGDEADYYCQVWDSSTVVFGGGTK |
| | | LTVLGQPKAAPSVTLFPPSSEELQAN |
| | | KATLVCLISDFYPGAVTVAWKADSS |
| | | PVKAGVETTTPSKQSNNKYAASSYLS |
| | | LTPEQWKSHRSYSCQVTHEGSTVEK |
| | | TVAPTECS |
| 1106 | Hu anti-huCCR8 LIBC322176-1 HuIgG1z | QVQLVESGGGVVQPGRSLRLSCAAS |
| | mAb_HC | GLNFSNFGMHWVRQAPGKGLDWVA |
| | | VISYDGGNKYYADSVKGRFTVSRDN |
| | | SKNTLFLQMNSLRAEDTALYYCAKV |
| | | YYGSGSYYKKRYYYGMDVWGQGT |
| | | TVTVSSASTKGPSVFPLAPSSKSTSGG |
| | | TAALGCLVKDYFPEPVTVSWNSGAL |
| | | TSGVHTFPAVLQSSGLYSLSSVVTVP |
| | | SSSLGTQTYICNVNHKPSNTKVDKKV |
| | | EPKSCDKTHTCPPCPAPELLGGPSVFL |
| | | FPPKPKDTLMISRTPEVTCVVVDVSH |
| | | EDPEVKFNWYVDGVEVHNAKTKPR |
| | | EEQYNSTYRVVSVLTVLHQDWLNG |
| | | KEYKCKVSNKALPAPIEKTISKAKGQ |
| | | PREPQVYTLPPSREEMTKNQVSLTCL |
| | | VKGFYPSDIAVEWESNGQPENNYKT |
| | | TPPVLDSDGSFFLYSKLTVDKSRWQQ |
| | | GNVFSCSVMHEALHNHYTQKSLSLS |
| | | PGK |
| 1107 | Hu anti-huCCR8 LIBC323412-1 HuIgG1z | SYELTQPLSVSVALGQTARITCGGNN |
| | mAb_LC | IGSKNVHWYQQKPGQAPVLVIYRDS |
| | | NRPSGIPERFSGSKSGNTATLTISRAQ |
| | | AGDEADYYCQVWDSSTVVFGGGAK |
| | | LTVLGQPKAAPSVTLFPPSSEELQAN |
| | | KATLVCLISDFYPGAVTVAWKADSS |
| | | PVKAGVETTTPSKQSNNKYAASSYLS |
| | | LTPEQWKSHRSYSCQVTHEGSTVEK |
| | | TVAPTECS |
| 1108 | Hu anti-huCCR8 LIBC323412-1 HuIgG1z | QVQLVESGGGVVQPGRSLRLSCAAS |
| | mAb_HC | GFNFSSCGMHWVRQAPGKGLEWVA |
| | | VISYDGTNKYYADSVKGRFTISRDNS |
| | | KNTLYLQMNSLRAEDTAVYYCAKV |
| | | YYGSGIYYKKNYYYGMDVWGQGTT |
| | | VTVSSASTKGPSVFPLAPSSKSTSGGT |
| | | AALGCLVKDYFPEPVTVSWNSGALT |
| | | SGVHTFPAVLQSSGLYSLSSVVTVPS |
| | | SSLGTQTYICNVNHKPSNTKVDKKV |
| | | EPKSCDKTHTCPPCPAPELLGGPSVFL |
| | | FPPKPKDTLMISRTPEVTCVVVDVSH |
| | | EDPEVKFNWYVDGVEVHNAKTKPR |
| | | EEQYNSTYRVVSVLTVLHQDWLNG |
| | | KEYKCKVSNKALPAPIEKTISKAKGQ |
| | | PREPQVYTLPPSREEMTKNQVSLTCL |
| | | VKGFYPSDIAVEWESNGQPENNYKT |
| | | TPPVLDSDGSFFLYSKLTVDKSRWQQ |
| | | GNVFSCSVMHEALHNHYTQKSLSLS |
| | | PGK |
| 1109 | huCCR8_32360_huIgG1z mAb_HC | EVQLVESGGGLVKPGGSLRLSCAAS |
| | | GFTFSNARMGWVRQAPGKGLEWVG |
| | | RIKSKTEGGTRDYAAPVKGRFTISRD |
| | | DSKNTLYLQMNSLKTEDTAVYYCTS |
| | | YSGVWGQGTMVTVSSASTKGPSVFP |
| | | LAPSSKSTSGGTAALGCLVKDYFPEP |
| | | VTVSWNSGALTSGVHTFPAVLQSSG |
| | | LYSLSSVVTVPSSSLGTQTYICNVNH |
| | | KPSNTKVDKKVEPKSCDKTHTCPPCP |
| | | APELLGGPSVFLFPPKPKDTLMISRTP |
| | | EVTCVVVDVSHEDPEVKFNWYVDG |
| | | VEVHNAKTKPREEQYNSTYRVVSVL |
| | | TVLHQDWLNGKEYKCKVSNKALPA |
| | | PIEKTISKAKGQPREPQVYTLPPSREE |
| | | MTKNQVSLTCLVKGFYPSDIAVEWE |
| | | SNGQPENNYKTTPPVLDSDGSFFLYS |
| | | KLTVDKSRWQQGNVFSCSVMHEAL |
| | | HNHYTQKSLSLSPGK |
| 1110 | huCCR8_32360_huIgG1z mAb_LC | DIVMTQSPDSLAVSLGERATINCKSS |
| | | QSVLYSSNNKNYLAWYHQKPGQSPK |
| | | LLISWASTRESGVPDRFSGSGSGTDFT |
| | | LTINSLQAEDVAVYYCQQYYSIPITFG |
| | | GGTKVEIKRTVAAPSVFIFPPSDEQLK |
| | | SGTASVVCLLNNFYPREAKVQWKVD |
| | | NALQSGNSQESVTEQDSKDSTYSLSS |
| | | TLTLSKADYEKHKVYACEVTHQGLS |
| | | SPVTKSFNRGEC |
| 1111 | MPK20298-A4_SCFV | CAGGTGCAGCTGGTGGAGTCTGGG |
| | | GGAGGCGTGGTCCAGCCTGGGAGG |
| | | TCCCTGAGACTCTCCTGTGTAGTCT |
| | | CTGGATTCAACTTCAGTAACAATGG |
| | | CATGCACTGGGTCCGCCAGGCTCCA |
| | | GGCAAGGGACTGGAGTGGGTGGCA |
| | | GTTATTTCAAATGATGGAAGTAATA |
| | | AATACTATGCAGACTCCGTGAAGG |
| | | GCCGATTCACCATCTCCAGAGACA |
| | | ATTCCAAGAACACGCTGTATCTACA |
| | | AATGAACAGCCTGAGAACTGAGGA |
| | | CACGGCTGTGTATTACTGTGCGAAA |
| | | GTTTACTATGGTTCGGGTATTTATT |
| | | ATAAAAACAGGAACTACTACGGTA |
| | | TGGACGTCTGGGGCCAAGGGACCA |
| | | CGGTCACCGTCTCCTCAGGTGGTGG |
| | | TGGTTCTGGCGGCGGCGGCTCCGGT |
| | | GGTGGTGGTTCTTCATATGAGCTGA |
| | | CTCAGCCACCCTCAGTGTCAGTGGC |
| | | CCTGGGACAGACGGCCAGGATTAC |
| | | CTGTGGGGGAAACAACATTGGAAG |
| | | TCAAAATGTGCACTGGTACCAGCA |
| | | GAAGCCAGGCCAGGCCCCTGTGCT |
| | | GGTCATCTATAGGGATAGCAACCG |
| | | GCCCTCTGGGATCCCTGACCGATTC |
| | | TCTGGCTCCAAGTCGGGGAACACG |
| | | GCCACCCTGACCATCAGCAGAGCC |
| | | CAAGCCGGGGATGAGGCTGACTAT |
| | | TACTGTCAGGTGTGGGACAGCAGC |
| | | ACTGTGGTTTTCGGCGGAGGGACC |
| | | AAGCTGACCGTCCTA |
| 1112 | MPK20299-D2_SCFV | CAGGTGCAGCTGGTGGAGTCTGGG |
| | | GGAGGCGTGGTCCAGCCTGGGAGG |
| | | TCCCTGAGACTCTCCTGTGCAGCCT |
| | | CTGGATTCAACTTCAGTAACTATGG |
| | | CATGCACTGGGTCCGCCAGGCTCCA |
| | | GGCAAGGGGCTGGAATGGGTGGCA |
| | | GTTATATCATATGATGGAAGTAATA |
| | | AATATTATGCAGACTCCGTGAAGG |
| | | GCCGATTCACCATCTCCAGAGACA |
| | | ATTCCAAGAACACGCTGTATCTACA |
| | | AATGAACAGCCTGAGAGCTGAGGA |
| | | CACGGCTGTGTATTTCTGTGCGAGA |
| | | GTTTACTATGGTTCGGGGATTTATT |
| | | ATAAAAAGAGATACTACTACGGTA |
| | | TGGACGTCTGGGGCCAAGGGACCA |
| | | CGGTCACCGTCTCCTCAGGTGGTGG |
| | | TGGTTCTGGCGGCGGCGGCTCCGGT |
| | | GGTGGTGGTTCTTCATATGAGCTGA |
| | | CTCAGCCACCCTCAGTGTCAGTGGC |
| | | CCTGGGACAGACGGCCAGGATTAC |
| | | CTGTGGGGGACACAACATTGGAAG |
| | | TAAAGGTGTGCACTGGTACCAGCA |
| | | GAAGCCAGGCCAGGCCCCTGTGCT |
| | | GGTCATCTATAGGAATAGCAACCG |
| | | GCCCTCTGGGATCCCTGAGCGATTC |
| | | TCTGGCTCCAACTCGGGGAACACG |
| | | GCCACCCTGACCATCACCAGAGCC |
| | | CAAGCCGGGGATGAGGCTGACTAT |
| | | TACTGTCAGGTGTGGGACAGCAGC |
| | | ACTGTGGTTTTCGGCGGAGGGACC |
| | | AAGCTGACCGTCCTA |
| 1113 | MPK20299-F11_SCFV | CAGGTGCAGCTGGTGGAGTCCGGG |
| | | GGAGGCGTGGTCCAGCCTGGGAGG |
| | | TCCCTGAGACTCTCCTGTGCACCCT |
| | | CTGGATTCAACTTCAGTAACTATGG |
| | | CATGCACTGGGTCCGCCAGGCTCCA |
| | | GGCAAGGGGCTGGAGTGGGTGGCA |
| | | GTTATATCATATGATGGAAGTAATA |
| | | AATATTATGCAGACTCCGTGAAGG |
| | | GCCGATTCACCATCTCCAGAGACA |
| | | ATTCCAAAAACACGCTGTTTCTGCA |
| | | AATGAACAGCCTGAGAGCTGAGGA |
| | | CACGGCTGTGTATTTCTGTGCGAGA |
| | | GTTTACTATGGTTCGGGGAGTTATT |
| | | ATAAAAAGAGATACTACTACGGTA |
| | | TGGACGTCTGGGGCCAAGGGACCA |
| | | CGGTCACCGTCTCCTCAGGTGGTGG |
| | | TGGTTCTGGCGGCGGCGGCTCCGGT |
| | | GGTGGTGGTTCTTCATATGAGCTGA |
| | | CTCAGCCACCCTCAGTGTCAGTGGC |
| | | CCTGGGACAGACGGCCAGGATTAC |
| | | CTGTGGGGGAAACAACATTGGAAG |
| | | TCAAAATGTGCACTGGTACCAGCA |
| | | GAAGCCAGGCCAGGCCCCTGTGCT |
| | | GGTCATCTATAGGGATAGCAACCG |
| | | GCCCTCTGGGATCCCTGAGCGATTC |
| | | TCTGGCTCCAAGTCGGGGAACACG |
| | | GCCACCCTGACCATCAGCAGAGCC |
| | | CAAGCCGGGGATGAGGCTGACTAT |
| | | TACTGTCAGGTGTGGGACAGCAGC |
| | | ACTGTGGTTTTCGGCGGAGGCACCC |
| | | AGCTGACCGTCCTA |
| 1114 | MPK20298-H6_SCFV | CAGGTGCAGCTGGTGGAGTCCGGG |
| | | GGAGGCGTGGTCCAGCCTGGGAGG |
| | | TCCCTGAGACTCTCCTGTGCAGCGT |
| | | CTGGATTCACCTTCAGTAGCTCTGG |
| | | CATGCACTGGGTCCGCCAGGCTCCA |
| | | GGCAAGGGGCTGGAGTGGGTGGCA |
| | | GTTATATCATATGATGGAACTAATA |
| | | AATACTATGCGGACTCCGTGAAGG |
| | | GCCGATTCACCATCTCCAGAGACA |
| | | ATTCCAAGAACACGCTGTATCTGCA |
| | | AATGAACAGCCTGAGAGCTGAGGA |
| | | CACGGCTGTGTATTACTGTGCGAAA |
| | | GTTTACTATGGTTCGGGTATTTATT |
| | | ATAAAAACAGGTACTACTACGGTA |
| | | TGGACGTCTGGGGCCAAGGGACCA |
| | | CGGTCACCGTCTCCTCAGGTGGTGG |
| | | TGGTTCTGGCGGCGGCGGCTCCGGT |
| | | GGTGGTGGTTCTTCATATGAGCTGA |
| | | CTCAGCCACCCTCAGTGTCAGTGGC |
| | | CCTGGGACAGACGGCCAGGATTAC |
| | | CTGTGGGGGACACAACATTGGAAG |
| | | TAAAGGTGTGCACTGGTACCAGCA |
| | | GAAGCCAGGCCAGGCCCCTGTGCT |
| | | GGTCATCTATAGAAATAGCAACCG |
| | | GCCCTCTGGGATCCCTGAGCGATTC |
| | | TCTGGCTCCAACTCGGGGAACACG |
| | | GCCACCCTGACCATCAGCAGAGCC |
| | | CAAGCCGGGGATGAGGCTGACTAT |
| | | TACTGTCAGGTGTGGGACAGCAGC |
| | | ACTGTGGTTTTCGGCGGAGGCACCC |
| | | AGCTGACCGTCCTA |
| 1115 | MPK20297-A4_SCFV | CAGGTGCAGCTGGTGGAGTCTGGG |
| | | GGAGGCGTGGTCCAGCCTGGGAGG |
| | | TCCCTGAGACTCTCCTGTGCAGTCT |
| | | CTGGATTCAACTTCAGTAACTATGG |
| | | CATGCACTGGGTCCGCCAGGTTCCA |
| | | GGCAGGGGGCTAGATTGGGTGGCA |
| | | GTTATATCAAATGATGGAAGTAAT |
| | | AAATACTATGCAGACTCCGTGAAG |
| | | GGCCGATTCACCATTTCCAGAGACA |
| | | ATTCCAAGAACACACTGTATCTGCA |
| | | AATGGACAGCCTGAGAACTGAGGA |
| | | CACGGCTGTGTATTACTGTGCGAAA |
| | | GTTTACTATGGTTCGGGTATTTATT |
| | | ATAAAAAGAGATACTACTACGGTA |
| | | TGGACGTCTGGGGCCAAGGGACCA |
| | | CGGTCACCGTCTCCTCAGGTGGTGG |
| | | TGGTTCTGGCGGCGGCGGCTCCGGT |
| | | GGTGGTGGTTCTTCATATGAGCTGA |
| | | CTCAGCCACCCTCAGTGTCAGTGGC |
| | | CCTGGGACAGACGGCCAGGATTAC |
| | | CTGTGGGGGACACAACATTGGAAG |
| | | TCAAAATGTGCACTGGTACCAGCA |
| | | GAAGCCAGGCCAGGCCCCTGTGCT |
| | | GGTCATCTATAGGGATAGCAACCG |
| | | GCCCTCTGGGATCCCTGAGCGATTC |
| | | TCTGGCTCCAAGTCGGGGAACACG |
| | | GCCACCCTGACCATCAGCAGAGCC |
| | | CAAGCCGGGGATGAGGCTGACTAT |
| | | TACTGTCAGGTGTGGGACAGCAGC |
| | | ACTGTGGTTTTCGGCGGAGGCACCC |
| | | AGCTGACCGTCCTA |
| 1116 | MPK20299-H8_SCFV | CAGGTGCAGCTGGTGGAGTCCGGG |
| | | GGAGGCGTGGTCCAGCCTGGGAGG |
| | | TCCCTGAGACTCTCCTGTGCAGCCT |
| | | CTGGATTCAACTTCAGTAACTATGG |
| | | CATGCACTGGGTCCGCCAGGCTCCA |
| | | GGCAAGGGGCTGGAATGGGTGGCA |
| | | GTTATATCATATGATGGAAGTAATA |
| | | AATATTATGCAGACTCCGTGAAGG |
| | | GCCGATTCACCATCTCCAGAGACA |
| | | ATTCCAAGAACACGCTGTATCTACA |
| | | AATGAACAGCCTGAGAGCTGAGGA |
| | | CACGGCTGTGTATTTCTGTGCGAGA |
| | | GTTTACTATGGTTCGGGGATTTATT |
| | | ATAAAAAGAGATACTACTACGGGA |
| | | TGGACGTCTGGGGCCAAGGGACCA |
| | | CGGTCACCGTCTCCTCAGGTGGTGG |
| | | TGGTTCTGGCGGCGGCGGCTCCGGT |
| | | GGTGGTGGTTCTTCATATGAGCTGA |
| | | CTCAGCCACCCTCGGTGTCAGTGGC |
| | | CCCAGGACAGACGGCCAGGATTAC |
| | | CTGTGGGGGAAACAACATTGGAAG |
| | | TAAAAATGTGCACTGGTACCAGCA |
| | | GAAGGCAGGCCAGGCCCCTGTGCA |
| | | GGTCATCTATAGAAATAGCAACCG |
| | | GCCCTCTGGGATCCCTGCGCGATTC |
| | | TCTGGCTCCAACTCGGGGAACACG |
| | | GCCACCCTGACCATCAGCAGAGCC |
| | | CAGGCCGGGGATGAGGCTGACTAT |
| | | TACTGTCAGGTGTGGGACAGCAGC |
| | | ACTGTGGTTTTCGGCGGTGGGACCA |
| | | AGCTGACCGTCCTA |
| 1117 | MPK20300-C11_SCFV | CAGGTGCAGCTGGTGGAGTCCGGG |
| | | GGAGGCGTGGTCCAGCCTGGGAGG |
| | | TCCCTGAGACTCTCCTGTGCAGCCT |
| | | CTGGATTCACCTTCAGTAGCTATGG |
| | | CATGCACTGGGTCCGCCAGGCTCCA |
| | | GGCAAGGGGCTGGAGTGGGTGGCA |
| | | GTTATATCATATGATGGAAGTAATA |
| | | AATACTATGCAGACTCCGTGAAGG |
| | | GCCGATTCACCATCTCCAGAGACA |
| | | ATTCCAAGAACACGCTGTATCTGCA |
| | | AATGAACAGCCTGAGAGGTGAGGA |
| | | CACGGCGGTGTATTACTGTGCGAG |
| | | AGTTTACTATGGTTCGGGGAGTTAT |
| | | TATAAAAACCGCTACTACTACGGTA |
| | | TGGACGTCTGGGGCCAAGGGACCA |
| | | CGGTCACCGTCTCCTCAGGTGGTGG |
| | | TGGTTCTGGCGGCGGCGGCTCCGGT |
| | | GGTGGTGGTTCTTCATATGAGCTGA |
| | | CTCAGCCACCCTCGGTGTCAGTGGC |
| | | CCCAGGACAGACGGCCAGGATTCC |
| | | CTGTGGGGGAAACAACATTGGAAG |
| | | TAAAAATGTGCACTGGTACCAGCA |
| | | GAAGCCAGGCCAGGCCCCTGTACT |
| | | GGTCATCTATAGGGATATCAACCG |
| | | GCCCTCTGGGATCCCTGAGCGATTC |
| | | TCTGGCTCCAACTCGGGGAACACG |
| | | GCCACCCTGACCATCAGCAGAGCC |
| | | CAAGCCGGGGATGAGGCTGACTAT |
| | | TACTGTCAGGTGTGGGACAGCAGC |
| | | GTGGTATTCGGCGGAGGGACCAAG |
| | | CTGACCGTCCTC |
| 1118 | MPK20298-B1_SCFV | CAGGTGCAGCTGGTGGAGTCCGGG |
| | | GGAGGCGTGGTCCAGCCTGGGAGG |
| | | TCCCTGAGACTCTCCTGTGCAGCCT |
| | | CTGGATTCAACTTCAGTAACTATGG |
| | | CATGCACTGGGTCCGCCAGGCTCCA |
| | | GGCAAGGGGCTGGAATGGGTGGCA |
| | | GTTATATCATATGATGGAAGTAATA |
| | | AATATTATGCAGACTCCGTGAAGG |
| | | GCCGATTCACCATCTCCAGAGACA |
| | | ATTCCAAGAACACGCTGTATCTACA |
| | | AATGAACAGCCTGAGAGCTGAGGA |
| | | CACGGCTGTGTATTTCTGTGCGAGA |
| | | GTTTACTATGGTTCGGGGATTTATT |
| | | ATAAAAAGAGATACTACTACGGTA |
| | | TGGACGTCTGGGGCCAAGGGACCA |
| | | CGGTCACCGTCTCCTCAGGTGGTGG |
| | | TGGTTCTGGCGGCGGCGGCTCCGGT |
| | | GGTGGTGGTTCTTCATATGAGCTGA |
| | | CTCAGCCACCCTCAGTGTCAGTGGC |
| | | CCTGGGACAGACGGCCAGGCTTAC |
| | | CTGTGAGGGAAACAACATTGGAAG |
| | | TAAAAATGTGCACTGGTACCAGCA |
| | | GAAGCCAGGCCAGGCCCCTGTGCT |
| | | GGTCATCTATAGGAATAGCAACCG |
| | | GCCCTCTGGGATCCCTGAGCGATTC |
| | | TCTGGCTCCAACTCGGGGAACACG |
| | | GCCACCCTGACTATTAGCAGAGTCC |
| | | AAGCCGGGGATGAGGCTGACTATT |
| | | ACTGTCAGGCGTGGGACAGCAGCA |
| | | CTGTGGTATTCGGCGGAGGCACCC |
| | | AGCTGACCGTCCTA |
| 1119 | MPK20297-E5_SCFV | CAGGTGCAGCTGGTGGAGTCCGGG |
| | | GGAGGCCTGGTCAAGCCTGGGGGG |
| | | TCCCTGAGACTCTCCTGTGCAGTCT |
| | | CTGGATTCAACTTCAGTAACAATGG |
| | | CATGCACTGGGTCCGCCAGGCTCCA |
| | | GGCAAGGGGCTGGAGTGGGTGGCA |
| | | GTCATATCGTATGATGGAAGTAATA |
| | | AATACTATACAGACTCCGTGAAGG |
| | | GCCGATTCACCATCTCCAGAGACA |
| | | ATTCCAAGAACACGCTGTATCTGCA |
| | | AATGAACAGCCTGAGAACTGAGGA |
| | | CACGGCTGTGTATTACTGTGCGAAA |
| | | GTTTACTATGGTTCGGGTATTTATT |
| | | ATAAAAAGAGATACTACTACGGTA |
| | | TGGACGTCTGGGGCCAAGGGACCA |
| | | CGGTCACCGTCTCCTCAGGTGGTGG |
| | | TGGTTCTGGCGGCGGCGGCTCCGGT |
| | | GGTGGTGGTTCTTCATATGAGCTGA |
| | | CTCAGCCACTCTCAGTGTCAGAGGC |
| | | CCTGGGACAGACGGCCAGGATTAC |
| | | CTGTGGGGGAAACAACATTGGAAG |
| | | TAAAAATGTGCACTGGTACCAGCA |
| | | GAAGCCAGGCCAGGCCCCTGTACT |
| | | GGTCATCTATAGGGATAGCAACCG |
| | | GCCCTCAGGGATCCCTGAGCGATTC |
| | | TCTGGCTCCAACTCTGGGAACGCGG |
| | | CCACCCTGACCATCAGTAGGGTCG |
| | | AAGCCGGGGATGAGGCCGACTATT |
| | | ACTGTCAGGTGTGGGATAGTAGCA |
| | | GTGATCATGTGGTATTCGGCGGAG |
| | | GCACCCAGCTGACCGTCCTA |
| 1120 | MPK20299-A3_SCFV | CAGGTGCAGCTGGTGGAGTCTGGG |
| | | GGAGGCGTGGTCCAGCCTGGGAGG |
| | | TCCCTGAGACTCTCCTGTGCAGCCT |
| | | CTGGATTCAACTTCAGTAACTATGG |
| | | CATGCACTGGGTCCGCCAGGCTCCA |
| | | GGCAAGGGGCTGGAATGGGTGGCA |
| | | GTTATATCATATGATGGAAGTAATA |
| | | AATATTATGCAGACTCCGTGAAGG |
| | | GCCGATTCACCATCTCCAGAGACA |
| | | ATTCCAAGAACACGCTGTATCTACA |
| | | AATGAACAGCCTGAGAGCTGAGGA |
| | | CACGGCTGTGTATTTCTGTGCGAGA |
| | | GTTTACTATGGTTCGGGGATTTATT |
| | | ATAAAAAGAGATACTACTACGGTA |
| | | TGGACGTCTGGGGCCAAGGGACCA |
| | | CGGTCACCGTCTCCTCAGGTGGTGG |
| | | TGGTTCTGGCGGCGGCGGCTCCGGT |
| | | GGTGGTGGTTCTTCATATGAGCTGA |
| | | CTCAGCCACCCTCGGTGTCAGTGGC |
| | | CCCAGGACAGACGGCCAGGATTAC |
| | | CTGTGGGGGAAACAACATTGGAAG |
| | | TAAAAATGTGCACTGGTACCAGCA |
| | | GAAGCCAGGCCAGGCCCCTGTACT |
| | | GGTCATCTATAGAAATAGCAACCG |
| | | GCCCTCTGGGATCCCTGAGCGATTC |
| | | TCTGGCTCCAACTCTGGGAACACAG |
| | | CCACTCTGACCATCAGCGGGACCC |
| | | AGGCTATGGATGAGGCTGACTATT |
| | | ACTGTCAGGCGTGGGACAGCAGCA |
| | | ATGTGGTATTCGGCGGAGGCACCC |
| | | AGCTGACCGTCCTA |
| 1121 | MPK20297-B4_SCFV | CAGGTGCAGCTGGTGGAGTCCGGG |
| | | GGAGGCGTGGTCCAGCCTGGGAGG |
| | | TCCCTGAGACTCTCCTGTGTAGTCT |
| | | CTGGATTCAACTTCAGTAGGAATGG |
| | | CATGCACTGGGTCCGCCAGGTTCCA |
| | | GGCAGGGGGCTAGATTGGGTGGCA |
| | | GTTATATCAAATGATGGAAGTAAT |
| | | AAATACTATGCAGACTCCGTGAAG |
| | | GGCCGATTCACCATCTCCAGAGAC |
| | | AATTCCAAGAACACGCTGTATCTGC |
| | | AAATGAACAGCCTGAGAGCTGAGG |
| | | ACACGGCTGTGTATTACTGTGCGAA |
| | | AGTTTACTATGGTTCGGGGATTTAT |
| | | TATAAAAATAACTACTATTACGGTA |
| | | TGGACGTCTGGGGCCAAGGGACCA |
| | | CGGTCACCGTCTCCTCAGGTGGTGG |
| | | TGGTTCTGGCGGCGGCGGCTCCGGT |
| | | GGTGGTGGTTCTTCATATGAGCTGA |
| | | CTCAGCCACTCTCAGTGTCAGTGGC |
| | | CCTGGGACAGACGGCCAGGATTAC |
| | | CTGTGGGGGAAACAACATTGGAAG |
| | | TCAAAATGTGCACTGGTACCAGCA |
| | | GAAGCCAGGCCAGGCCCCTGTGCT |
| | | GGTCATCTATAGGGATAGCAACCG |
| | | GCCCTCTGGGATCCCTGACCGATTC |
| | | TCTGGCTCCAAGTCGGGGAACACG |
| | | GCCACCCTGACCATCAGCAGAGCC |
| | | CAAGCCGGGGATGAGGCTGACTAT |
| | | TACTGTCAGGTGTGGGACAGCAGC |
| | | ACTGTGGTTTTCGGCGGAGGCACCC |
| | | AGCTGACCGTCCTA |
| 1122 | MPK20298-F6_SCFV | CAGGTGCAGCTGGTGGAGTCTGGG |
| | | GGAGGCGTGGTCCAGCCTGGGAGG |
| | | TCCCTGAGACTCTCCTGTGTAGTCT |
| | | CTGGATTCAACTTCAGTAGGAATGG |
| | | CATGCACTGGGTCCGCCAGGTTCCA |
| | | GGCAGGGGGCTAGATTGGGTGGCA |
| | | GTTATATCAAATGATGGAAGTAAT |
| | | AAATACTATGCAGACTCCGTGAAG |
| | | GGCCGATTCACCATCTCCAGAGAC |
| | | AATTCCAAGAACACGCTGTATCTGC |
| | | AAATGAACAGCCTGAGAGCTGAGG |
| | | ACACGGCTGTGTATTACTGTGCGAA |
| | | AGTTTACTATGGTTCGGGGATTTAT |
| | | TATAAAAACCGCTATTACTACGGTA |
| | | TGGACGTCTGGGGCCAAGGGACCA |
| | | CGGTCACCGTCTCCTCAGGTGGTGG |
| | | TGGTTCTGGCGGCGGCGGCTCCGGT |
| | | GGTGGTGGTTCTTCATATGAGCTGA |
| | | CTCAGCCACCCTCGGTGTCAGTGGC |
| | | CCCAGGACAGACGGCCAGGATTAC |
| | | CTGTGGGGGAAACAACATTGGAAG |
| | | TAAAAATGTGCACTGGTACCAGCA |
| | | GAAGCCAGGCCAGGCCCCTGTGCT |
| | | GGTCATCTATAGGGATAGCAACCG |
| | | GCCCTCTGGGATCCCTGAGCGATTC |
| | | TCTGGCTCCAAGTCGGGGACCACG |
| | | GCCACCCTGACCATCAGCAGAGCC |
| | | CAAGCCGGGGATGAGGCTGAGTAT |
| | | TACTGTCAGGTGTGGGACAGCAGC |
| | | ACTGTGGTTTTCGGCGGAGGGACC |
| | | GAGCTGACCGTCCTA |
| 1123 | MPK20299-H3_SCFV | CAGGTGCAGCTGGTGGAGTCCGGG |
| | | GGAGGCGTGGTCCAGCCTGGGAGG |
| | | TCCCTGAGACTCTCCTGTGCAGCCT |
| | | CTGGATTCAACTTCAGTAACTATGG |
| | | CATGCACTGGGTCCGCCAGGCTCCA |
| | | GGCAAGGGGCTGGAATGGGTGGCA |
| | | GTTATATCATATGATGGAAGTAATA |
| | | AATATTATGCAGACTCCGTGAAGG |
| | | GCCGATTCACCATCTCCAGAGACA |
| | | ATTCCAAGAACACGCTGTATCTACA |
| | | AATGAACAGCCTGAGAGCTGAGGA |
| | | CACGGCTGTGTATTTCTGTGCGAGA |
| | | GTTTACTATGGTTCGGGGATTTATT |
| | | ATAAAAAGAGATACTACTACGGTA |
| | | TGGACGTCTGGGGCCAAGGGACCA |
| | | CGGTCACCGTCTCCTCAGGTGGTGG |
| | | TGGTTCTGGCGGCGGCGGCTCCGGT |
| | | GGTGGTGGTTCTTCATATGAGCTGA |
| | | CACAGCCACTCTCAGTGTCAGTGGC |
| | | CCTGGGACAGACGGCCAGGATTAC |
| | | CTGTGGGGGAAACAACATTGGAAG |
| | | TAAAAATGTGCACTGGTACCAGCA |
| | | GAAGCCAGGCCAGGCCCCTGTGCT |
| | | GGCCATCTATAGGAATAGCAACCG |
| | | GCCCTCTGGGATCCCTGAGCGATTC |
| | | ACTGGCTCCAACTCGGGGAACACG |
| | | GCCACCCTGACCATCAGCAGAGCC |
| | | CAAGCCGGGGATGAGTCTGACTAT |
| | | TACTGTCAAATATGGGACAGCAGC |
| | | ACTGTGGTATTCGGCGGAGGCACC |
| | | AAGCTGACCGTCCTA |
| 1124 | MPK20298-B9_SCFV | CAGGTGCAGCTGGTGGAGTCCGGG |
| | | GGAGGCGTGGTCCAGCCTGGGAGG |
| | | TCCCTGAGACTCTCCTGTGCAGCCT |
| | | CTGGATTCAACTTCAGTAGGAATGG |
| | | CATGCACTGGGTCCGCCAGGTTCCA |
| | | GGCAGGGGGCTAGATTGGGTGGCA |
| | | GTTATATCAAATGATGGAAGTAAT |
| | | AAATACTATGCGGACTCCGTGAAG |
| | | GGCCGATTCACCATCTCCAGAGAC |
| | | AATTCCAAGAACACGCTGTATCTGC |
| | | AAATGAACAGCCTGAGAGCTGAGG |
| | | ACACGGCTGTGTATTACTGTGCGAA |
| | | AGTTTACTATGGTTCGGGTATTTAT |
| | | TATAAAAAGAACTACTACTACGGT |
| | | ATGGACGTCTGGGGCCAAGGGACC |
| | | ACGGTCACCGTCTCCTCAGGTGGTG |
| | | GTGGTTCTGGCGGCGGCGGCTCCG |
| | | GTGGTGGTGGTTCTTCATATGAGCT |
| | | GACTCAGCCACCCTCGGTGTCAGTG |
| | | GCCCTGGGACAGACGGCCAGGATT |
| | | TCCTGTGGGGGAAACAACATTGGA |
| | | AGTAAAAATGTGCACTGGTACCAG |
| | | CAGAAGCCAGGCCAGGCCCCTGTG |
| | | CTGGTCATCTATAGGGATAGCAACC |
| | | GGCCCTCTGGGATCCCTGAGCGATT |
| | | CTCTGGCTCCAAGTCGGGGACCAC |
| | | GGCCACCCTGACCATCAGCAGAGC |
| | | CCAAGCCGGGGATGAGGCTGAGTA |
| | | TTACTGTCAGGTGTGGGACAGCAG |
| | | CACTGTGGTTTTCGGCGGAGGCACC |
| | | CAGCTGACCGTCCTA |
| 1125 | MPK20299-E2_SCFV | CAGGTGCAGCTGGTGGAGTCCGGG |
| | | GGAGGCGTGGTCCAGCCTGGGAGG |
| | | TCCCTGAGACTCTCCTGTGCAGTCT |
| | | CTGGATTCAACTTCAGTAACAATGG |
| | | CATGCACTGGGTCCGCCAGGCTCCA |
| | | GGCAAGGGGCTGGAGTGGGTGGCA |
| | | GTCATATCGTATGATGGAAGTAATA |
| | | AATACTATACAGACTCCGTGAAGG |
| | | GCCGATTCACCATCTCCAGAGACA |
| | | ATTCCAAGAACACGCTGTATCTGCA |
| | | AATGAACAGCCTGAGAACTGAGGA |
| | | CACGGCTGTGTATTACTGTGCGAAA |
| | | GTTTACTATGGTTCGGGTATTTATT |
| | | ATAAAAAGAGATACTACTACGGTA |
| | | TGGACGTCTGGGGCCAAGGGACCA |
| | | CGGTCACCGTCTCCTCAGGTGGTGG |
| | | TGGTTCTGGCGGCGGCGGCTCCGGT |
| | | GGTGGTGGTTCTTCATATGAGCTGA |
| | | CTCAGCCACCCTCAGTGTCAGTGGC |
| | | CCTGGGACAGACGGCCAGGATTAC |
| | | CTGTGAGGGAAACAACATTGGAAG |
| | | TCAAAATGTGCACTGGTACCAGCA |
| | | GAAGCCAGGCCAGGCCCCTGTGCT |
| | | GGTCATGTATAGGGATAGCAACCG |
| | | GCCCTCTGGGATCCCTGAACGATTC |
| | | TCTGGCTCCAAGTCGGGGAACACG |
| | | GCCACCCTGGCCATCAGCAGAGCC |
| | | CAAGCCGGGGATGAGTCTGACTAT |
| | | TACTGTCAGGTGTGGGACGGCAGT |
| | | GCCGTGGTATTCGGCGGAGGGACC |
| | | AAGCTGACCGTCCTA |
| 1126 | MPK20299-D6_SCFV | CAGGTGCAGCTGGTGGAGTCTGGG |
| | | GGAGGCGTGGTCCAGCCTGGGAGG |
| | | TCCCTGAGACTCTCCTGTGCAGCGT |
| | | CTGGATTCACCTTCAGTAGCTATGG |
| | | CATGCACTGGGTCCGCCAGGCTCCA |
| | | GGCAAGGGGCTGGAGTGGGTGGCA |
| | | GTTATATCATATGATGGAAGTAATA |
| | | AATATTATGCAGACTCCGTGAAGG |
| | | GCCGATTCACCATCTCCAGAGACA |
| | | ATTCCAAGAACACGCTGTATCTACA |
| | | AATGAACAGCCTGAGAGCTGAGGA |
| | | CACGGCTGTGTATTTCTGTGCGAGA |
| | | GTTTACTATGGTTCGGGGATTTATT |
| | | ATAAAAAGAGATACTACTACGGTA |
| | | TGGACGTCTGGGGCCAAGGGACCA |
| | | CGGTCACCGTCTCCTCAGGTGGTGG |
| | | TGGTTCTGGCGGCGGCGGCTCCGGT |
| | | GGTGGTGGTTCTTCATATGAGCTGA |
| | | CTCAGCCACTCTCAGTGTCAGTGGC |
| | | CCTGGGACAGACGGCCAGGATTAC |
| | | CTGTGAGGGAAACAACATTGGAAG |
| | | TCAAAATGTGCACTGGTACCAGCA |
| | | GAAGCCAGGCCAGGCCCCTGTGCT |
| | | GGTCATGTATAGGGATAGCAACCG |
| | | GCCCTCTGGGATCCCTGAACGATTC |
| | | TCTGGCTCCAAGTCGGGGAACACG |
| | | GCCACCCTGGCCATCAGCAGAGCC |
| | | CAAGCCGGGGATGAGTCTGACTAT |
| | | TACTGTCAGGTGTGGGACGGCAGT |
| | | GCCGTGGTATTCGGCGGAGGCACC |
| | | CAGCTGACCGTCCTA |
| 1127 | MPK20299-A4_SCFV | CAGGTGCAGCTGGTGGAGTCCGGG |
| | | GGAGGCGTGGTCCAGCCTGGGAGG |
| | | TCCCTGAGACTCTCCTGTGCAGCCT |
| | | CTGGATTCACCTTCAGTAACTATGG |
| | | CTTTCACTGGGTCCGCCAGACTCCA |
| | | GGCAAGGGGCTGGAGTGGGTGGCA |
| | | GTTATATCATATGATGGAAGTAATA |
| | | GATACTATGCAGACTCCGTGAAGG |
| | | GCCGATTCACCATCTCCAGAGACA |
| | | ATTCCAAGAACACGCTGTATCTCCA |
| | | AATGAACAGCCTGAGAGGTGAGGA |
| | | CACGGCGCTATATTACTGTGCGAGA |
| | | GTTTACTATGGTTCGGGGACTTATT |
| | | ATAAAAACCGCTACTACTACGGTAT |
| | | GGACGTCTGGGGCCAAGGGACCAC |
| | | GGTCACCGTCTCCTCAGGTGGTGGT |
| | | GGTTCTGGCGGCGGCGGCTCCGGT |
| | | GGTGGTGGTTCTTCATATGAGCTGA |
| | | CTCAGCCACCCTCAGTGTCAGTGGC |
| | | CCTGGGACAGACGGCCAGGATTAC |
| | | CTGTGGGGGACACAACATTGGAAG |
| | | TAAAGGTGTGCACTGGTACCAGCA |
| | | GAAGCCAGGCCAGGCCCCTGTACT |
| | | GGTCATCTATAGAAATAGCAACCG |
| | | GCCCTCTGGGATCCCTGAGCGATTC |
| | | TCTGGCTCCAACTCTGGGAACACAG |
| | | CCACTCTGACCATCAGCGGGACCC |
| | | AGGCTATGGATGAGGCTGACTATT |
| | | ACTGTCAGGCGTGGGACAGCGGCA |
| | | CTGTGGTATTCGGCGGAGGCACCC |
| | | AGCTGACCGTCCTA |
| 1128 | MPK20300-G5_SCFV | CAGGTGCAGCTGGTGGAGTCCGGG |
| | | GGAGGCGTGGTCCAGCCTGGGAGG |
| | | TCCCTGAGACTCTCCTGTGCAGCCT |
| | | CTGGATTCACCTTCAGTAACTATGG |
| | | CTTTCACTGGGTCCGCCAGACTCCA |
| | | GGCAAGGGGCTGGAGTGGGTGGCA |
| | | GTTATATCATATGATGGAAGTAATA |
| | | GATACTATGCAGACTCCGTGAAGG |
| | | GCCGATTCACCATCTCCAGAGACA |
| | | ATTCCAAGAACACGCTGTATCTCCA |
| | | AATGAACAGCCTGAGAGGTGAGGA |
| | | CACGGCGCTATATTACTGTGCGAGA |
| | | GTTTACTATGGTTCGGGGACTTATT |
| | | ATAAAAACCGCTACTACTACGGTAT |
| | | GGACGTCTGGGGCCAAGGGACCAC |
| | | GGTCACCGTCTCCTCAGGTGGTGGT |
| | | GGTTCTGGCGGCGGCGGCTCCGGT |
| | | GGTGGTGGTTCTTCATATGAGCTGA |
| | | CTCAGCCACCCTCAGTGTCAGTGGC |
| | | CCTGGGACAGACGGCCAGGATTAC |
| | | CTGTGGGGCAAACAACATTGGAAG |
| | | TAAAAATGTTCACTGGTACCAGCA |
| | | GAAGCCAGGCCAGCCCCCTGTGCT |
| | | GGTCATCTATAGAGATTTCAACCGG |
| | | CCCTCTGGGATCCCTGAGCGATTCT |
| | | CTGCCTCCAACTCGGGGAACACGG |
| | | CCACCCTGACCATCAGCAGAGGCC |
| | | AAGCCGGGGATGAGGCTGACTATT |
| | | ACTGTCAGGTGTGGGACAGCAGCA |
| | | CTGGGAATGTGGTATTCGGCGGAG |
| | | GGACCAAGCTGACCGTCCTA |
| 1129 | MPK20299-C3_SCFV | CAGGTGCAGCTGGTGGAGTCTGGG |
| | | GGAGGCGTGGTCCAGCCTGGGAGG |
| | | TCCCTGAGACTCTCCTGTGCAGCCT |
| | | CTGGATTCATCTTCAGTAACTATGG |
| | | CTTTCACTGGGTCCGCCAGACTCCA |
| | | GGCAAGGGGCTGGAGTGGGTGGCA |
| | | GTTATATCATATGATGGAAGTAATA |
| | | AATACTATGCAGACTCCGTGAAGG |
| | | GCCGATTCACCATCTCCAGAGACA |
| | | ATTCCAAGAACACGCTGTATCTGCA |
| | | AATGAACAGCCTGAGAGGTGAGGA |
| | | CACGGCGGTGTATTACTGTGCGAG |
| | | AGTTTACTATGGTTCGGGGAGTTAT |
| | | TATAAAAACCGCTACTACTACGGTA |
| | | TGGACGTCTGGGGCCAAGGGACCA |
| | | CGGTCACCGTCTCCTCAGGTGGTGG |
| | | TGGTTCTGGCGGCGGCGGCTCCGGT |
| | | GGTGGTGGTTCTTCATATGAGCTGA |
| | | CTCAGCCACCCTCGGTGTCAGTGGC |
| | | CCCAGGACAGACGGCCAGGATTAC |
| | | CTGTGGGGGAAACAACATTGGAAG |
| | | TAAAAATGTGCACTGGTACCAGCA |
| | | GAAGCCAGGCCAGGCCCCTGTGCT |
| | | GGTCATCTATAGGGATAGCAACCG |
| | | GCCCTCTGGGATCCCTGAGCGATTC |
| | | TCTGGCTCCAAGTCGGGGACCACG |
| | | GCCACCCTGACCATCAGCAGAGCC |
| | | CAAGCCGGGGATGAGGCTGACTAT |
| | | TACTGTCAGGTGTGGGACAGCAGC |
| | | ACTGTGGTTTTCGGCGGAGGGACC |
| | | GAGCTGACCGTCCTA |
| 1130 | MPK20299-B7_SCFV | CAGGTGCAGCTGGTGGAGTCTGGG |
| | | GGAGGCGTGGTCCAGCCTGGGAGG |
| | | TCCCTGAGACTCTCCTGTGCAGCCT |
| | | CTGGATTCAACTTCAGTAACTATGG |
| | | CATGCACTGGGTCCGCCAGGCTCCA |
| | | GGCAAGGGGCTGGAATGGGTGGCA |
| | | GTTATATCATATGATGGAAGTAATA |
| | | AATATTATGCAGACTCCGTGAAGG |
| | | GCCGATTCACCATCTCCAGAGACA |
| | | ATTCCAAGAACACGCTGTATCTACA |
| | | AATGAACAGCCTGAGAGCTGAGGA |
| | | CACGGCTGTGTATTTCTGTGCGAGA |
| | | GTTTACTATGGTTCGGGGATTTATT |
| | | ATAAAAAGAGATACTACTACGGTA |
| | | TGGACGTCTGGGGCCAAGGGACCA |
| | | CGGTCACCGTCTCCTCAGGTGGTGG |
| | | TGGTTCTGGCGGCGGCGGCTCCGGT |
| | | GGTGGTGGTTCTTCATATGAGCTGA |
| | | CTCAGTCATCCTCGGTGTCAGTGGC |
| | | CCCAGGACAGACGGCCAGGATTAC |
| | | CTGTGGGGGAAACAACATTGGAAG |
| | | TAAAAATGTGCACTGGTACCAGCA |
| | | GAAGCCAGGCCAGGCCCCTGTGTT |
| | | GGTCATCTATAGGGATAGCAACCG |
| | | GCCCTCTGGGATCCCTGAGCGATTC |
| | | TCTGGCTCCAAGTCGGGGACCACG |
| | | GCCACCCTGACCATCAGCAGGGTC |
| | | GAAGCCGGGGATGAGGCCGACTAT |
| | | TACTGTCAGGTGTGGGATAGTAGTA |
| | | GTGCTCATGTGATATTCGGCGGAGG |
| | | GACCAAGCTGACCGTCCTA |
| 1131 | MPK20299-A5_SCFV | CAGGTGCAGCTGGTGGAGTCCGGG |
| | | GGAGGCGTGGTCCAGCCTGGGAGG |
| | | TCCCTGAGACTCTCCTGTGGAGCCT |
| | | CTGGATTCACCTTCAGTGGCTATGG |
| | | CATGCACTGGGTCCGCCAGGCTCCA |
| | | GGCAAGGGGCTGGAGTGGGTGGCA |
| | | GTTATATCATATGATGGAAGTAATA |
| | | AATACTATGCAGACTCCGTGAAGG |
| | | GCCGATTCACCATCTCAAGAGACA |
| | | ATTCCAAGAACACGCTGTATCTGCA |
| | | AATGAACAGCCTGAGAGGTGAGGA |
| | | CACGGCGGTGTATTACTGTGCGAG |
| | | AGTTTATTATGGTTCGGGGATTTAT |
| | | TATAAAAACCGCTACTACTACGGTA |
| | | TGGACGTCTGGGGCCAAGGGACCA |
| | | CGGTCACCGTCTCCTCAGGTGGTGG |
| | | TGGTTCTGGCGGCGGCGGCTCCGGT |
| | | GGTGGTGGTTCTTCATATGAGCTGA |
| | | CTCAGCCACCCTCAGGGTCAGTGGC |
| | | CCTGGGACAGACGGCCAGGATCAC |
| | | CTGTGGGGGAAACAACCTTGGAAG |
| | | TAAAAATGTGCACTGGTACCAACA |
| | | GAAGCCAGGCCAGGCCCCTGTGCT |
| | | GGTCATCTATAGAAATAGCAACCG |
| | | GCCCTCTGGGATCCCTGAGCGATTC |
| | | TCTGGCTCCAACTCGGGGAACACG |
| | | GCCACCCTGACCATCAGCAGAGCC |
| | | CAGGCCGGGGATGAGGCTGACTAT |
| | | TACTGTCAGGTGTGGGACAGCAGC |
| | | ACTGTGGTATTCGGCGGTGGGACC |
| | | AAGCTGACCGTCCTA |
| 1132 | MPK20299-D1_SCFV | CAGGTGCAGCTGGTGGAGTCTGGG |
| | | GGAGGCCTGGTCAAGCCTGGGGGG |
| | | TCCCTGAGACTCTCCTGTGCAGCCT |
| | | CTGGATTCACCTTCAGTAACAATGG |
| | | CATGCACTGGGTCCGCCAGGCTCCA |
| | | GGCAAGGGGCTGGAGTGGGTGGCA |
| | | GTCATATCGTATGATGGAAGTAATA |
| | | AATACTATGCGGACTCCGTGAAGG |
| | | GCCGATTCACCATCTCCAGAGACA |
| | | ATTCCAAGAACACGCTGTATCTGCA |
| | | AATGAACAGCCTGAGAGCTGAGGA |
| | | CACGGCTGTGTATTACTGTGCGAAA |
| | | GTTTATTATGGTTCGGGGATTTATT |
| | | ATAAAAACAGGTATTACTACGGGA |
| | | TGGACGTCTGGGGCCAAGGGACCA |
| | | CGGTCACCGTCTCCTCAGGTGGTGG |
| | | TGGTTCTGGCGGCGGCGGCTCCGGT |
| | | GGTGGTGGTTCTTCATATGAGCTGA |
| | | CTCAGCCACCCTCAGTGTCAGTGGC |
| | | CCTGGGACAGACGGCCAGGATTAC |
| | | CTGTGGGGGAAACAGAATTGGAAG |
| | | TAAAAATGTGCACTGGTACCAGCA |
| | | GAAGCCAGGCCAGGCCCCTGTGTT |
| | | GGTCATCTATAGGGATAGCAACCG |
| | | GCCCTCTGGGATCCCTGAGCGATTC |
| | | TCTGGCTCCAAGTCGGGGACCACG |
| | | GCCACCCTGACCATCAGCAGAGCC |
| | | CAAGCCGGGGATGAGGCTGAGTAT |
| | | TACTGTCAGGTGTGGGACAGCAGC |
| | | ACTGTGGTTTTCGGCGGAGGGACC |
| | | AAGCTGACCGTCCTA |
| 1133 | MPK20299-C5_SCFV | CAGGTGCAGCTGGTGGAGTCTGGG |
| | | GGAGGCGTGGTCCAGCCTGGGAGG |
| | | TCCCTGAGACTCTCCTGTGCAGCCT |
| | | CTGGATTCACCTTCAGTAACTATGG |
| | | CTTTCACTGGGTCCGCCAGACTCCA |
| | | GGCAAGGGGCTGGAGTGGGTGGCA |
| | | GTTATATCATATGATGGAAGTAATA |
| | | GATACTATGCAGACTCCGTGAAGG |
| | | GCCGATTCACCATCTCCAGAGACA |
| | | ATTCCAAGAACACGCTGTATCTCCA |
| | | AATGAACAGCCTGAGAGGTGAGGA |
| | | CACGGCGCTATATTACTGTGCGAGA |
| | | GTTTACTATGGTTCGGGGACTTATT |
| | | ATAAAAACCGCTACTACTACGGTAT |
| | | GGACGTCTGGGGCCAAGGGACCAC |
| | | GGTCACCGTCTCCTCAGGTGGTGGT |
| | | GGTTCTGGCGGCGGCGGCTCCGGT |
| | | GGTGGTGGTTCTTCATATGAGCTGA |
| | | CACAGCTACCTTCAGTGTCAGTGGC |
| | | CCTGGGACAGACGGCCAGGATTAC |
| | | CTGTGGGGGACACAACATTGGAAG |
| | | TAAAGGTGTGCACTGGTACCAGCA |
| | | GAAGCCAGGCCAGGCCCCTGTGCT |
| | | GGTCATCTATAGAAATAGCAACCG |
| | | GCCCTCTGGGATCCCTGAGCGATTC |
| | | TCTGGCTCCAACTCGGGGAACACG |
| | | GCCACCCTGACCATCAGCAGAGCC |
| | | CAAGCCGGGGATGAGGCTGACTAT |
| | | TACTGTCAGGTGTGGGACAGCAGC |
| | | ACTGTGGTTTTCGGCGGAGGGACC |
| | | GAGCTGACCGTCCTA |
| 1134 | MPK20299-B5_SCFV | CAGGTGCAGCTGGTGGAGTCTGGG |
| | | GGAGGCGTGGTCCAGCCTGGGAGG |
| | | TCCCTGAGACTCTCCTGTGCAGCCT |
| | | CTGGATTCAACTTCAGTAACTATGG |
| | | CATGCACTGGGTCCGCCAGGCTCCA |
| | | GGCAAGGGGCTGGAATGGGTGGCA |
| | | GTTATATCATATGATGGAAGTAATA |
| | | AATATTATGCAGACTCCGTGAAGG |
| | | GCCGATTCACCATCTCCAGAGACA |
| | | ATTCCAAGAACACGCTGTATCTACA |
| | | AATGAACAGCCTGAGAGCTGAGGA |
| | | CACGGCTGTGTATTTCTGTGCGAGA |
| | | GTTTACTATGGTTCGGGGATTTATT |
| | | ATAAAAACCGCTATTACTACGGTAT |
| | | GGACGTCTGGGGCCAAGGGACCAC |
| | | GGTCACCGTCTCCTCAGGTGGTGGT |
| | | GGTTCTGGCGGCGGCGGCTCCGGT |
| | | GGTGGTGGTTCTTCATATGAGCTGA |
| | | CTCAGCCACCCTCAGTGTCAGTGGC |
| | | CCTGGGACAGACGGCCAGGATTAC |
| | | CTGTGGGGGACACAACATTGGAAG |
| | | TAAAGGTGTGCACTGGTACCAGCA |
| | | GAAGCCAGGCCAGGCCCCTGTGCT |
| | | GGTCATCTATAGAAATAGCAACCG |
| | | GCCCTCTGGGATCCCTGAGCGATTC |
| | | TCTGGCTCCAACTCGGGGAACACG |
| | | GCCACCCTGACCATCAGCAGAGCC |
| | | CAAGCCGGGGATGAGGCTGACTAT |
| | | TACTGTCAGGTGTGGGACAGTAGT |
| | | ACTGTGGTTTTCGGCGGAGGCACCC |
| | | AGCTGACCGTCCTA |
| 1135 | MPK20299-G9_SCFV | CAGGTGCAGCTGGTGGAGTCTGGG |
| | | GGAGACTTGGTACAGCCTGGGAGG |
| | | TCCCTGAGACTCTCCTGTGCAGCGT |
| | | CTGGATTCACCTTCAGTAACAATGG |
| | | CATGCACTGGGTCCGCCAGGCTCCA |
| | | GGCAAGGGACTGGAGTGGGTGGCA |
| | | GTTATTTCAAATGATGGCAGTAATA |
| | | AATATTATGCAGATTCCGTGAGGG |
| | | GCCGATTCACCATCTCCAGAGACA |
| | | ATTCCAAGAACACGCTGTATCTGCA |
| | | AATGAACAGCCTGAGAGCTGAGGA |
| | | CACGGCTGTGTATTATTGTGCGAAA |
| | | GTTTACTATGGTTCGGGTATTTATT |
| | | ATAAAAACAGGTACTACTACGGGA |
| | | TGGACGTCTGGGGCCAAGGGACCA |
| | | CGGTCACCGTCTCCTCAGGTGGTGG |
| | | TGGTTCTGGCGGCGGCGGCTCCGGT |
| | | GGTGGTGGTTCTTCATATGAGCTGA |
| | | CTCAGCCACTCTCAGTGTCAGTGGC |
| | | CCTGGGACAGACGGCCAGGATTAC |
| | | CTGTGGGGGAAACAACATTGGAAG |
| | | TAAAAATGTGCACTGGTACCAGCA |
| | | GAAGCCAGGCCAGGCCCCTGTGCT |
| | | GGTCATCTATAGGAATAGCAACCG |
| | | GCCCTCTGGGATCCCTGAGCGATTC |
| | | TCTGGCTCCAACTCGGGGAACACG |
| | | GCCACCCTGACTCTTAGCAGAGTCC |
| | | AAGCCGGGGATGAGGCTGACTATT |
| | | ACTGTCAGGTGTGGGACAGCAGCA |
| | | CTGTGGTTTTCGGCGGAGGGACCA |
| | | AGCTGACCGTCCTA |
| 1136 | MPK20299-G5_SCFV | CAGGTGCAGCTGGTGGAGTCCGGG |
| | | GGAGGCGTGGTCCAGCCTGGGAGG |
| | | TCCCTGAGACTCTCCTGTGCAGTCT |
| | | CTGGATTCAACTTCAGTAACAATGG |
| | | CATGCACTGGGTCCGCCAGGCTCCA |
| | | GGCAAGGGACTGGAGTGGGTGGCA |
| | | GTTATTTCAAATGATGGCAGTAATA |
| | | AATATTATGCAGATTCCGTGAGGG |
| | | GCCGATTCACCATCTCCAGAGACA |
| | | ATTCCAAGAACACACTGTATCTGCA |
| | | AATGGACAGCCTGAGAACTGAGGA |
| | | CACGGCTGTGTATTACTGTGCGAAA |
| | | GTTTACTATGGTTCGGGTATTTATT |
| | | ATAAAAACAGGTACTACTACGGTA |
| | | TGGACGTCTGGGGCCAAGGGACCA |
| | | CGGTCACCGTCTCCTCAGGTGGTGG |
| | | TGGTTCTGGCGGCGGCGGCTCCGGT |
| | | GGTGGTGGTTCTTCATATGAGCTGA |
| | | CTCAGCCACCCTCAGTGTCAGTGGC |
| | | CCTGGGACAGACGGCCAGGCTTAC |
| | | CTGTGAGGGAAACAACATTGGAAG |
| | | TAAAAATGTGCACTGGTACCAGCA |
| | | GAAGCCAGGCCAGGCCCCTGTGTT |
| | | GGTCATCTATAGGGATAGCAACCG |
| | | GCCCTCTGGGATCCCTGAGCGCTTC |
| | | TCTGGCTCCAAGTCGGGGAACACG |
| | | GCCACCCTGGCCATCAGCAGAGCC |
| | | CAAGCCGGGGATGAGTCTGACTAT |
| | | TACTGTCAGGTGTGGGACAGCAGT |
| | | GCCGTGGTATTCGGCGGAGGCACC |
| | | AAGCTGACCGTCCTA |
| 1137 | MPK20298-C10_SCFV | CAGGTGCAGCTGGTGGAGTCCGGG |
| | | GGAGGCGTGGTCCAGCCTGGGAGG |
| | | TCCCTGAGACTCTCCTGTGCAGCCT |
| | | CTGGATTCACCTTCAGTAGCTCTGG |
| | | CATGCACTGGGTCCGCCAGGCTCCA |
| | | GGCAAGGGGCTGGAGTGGGTGGCA |
| | | GTTATATCAAATGATGGAAGTAAT |
| | | AAATACTATGCAGACTCCGTGAAG |
| | | GGCCGATTCACCATCTCCAGAGAC |
| | | AATTCCAAGAACACGCTGTATCTGC |
| | | AAATGAACAGCCTGAGAGCTGAGG |
| | | ACACGGCTGTGTATTACTGTGCGAA |
| | | AGTTTACTATGGTTCGGGGATTTAT |
| | | TATAAAAATAACTACTATTACGGTA |
| | | TGGACGTCTGGGGCCAAGGGACCA |
| | | CGGTCACCGTCTCCTCAGGTGGTGG |
| | | TGGTTCTGGCGGCGGCGGCTCCGGT |
| | | GGTGGTGGTTCTTCATATGAGCTGA |
| | | CTCAGCCACCCTCAGTGTCAGTGGC |
| | | CCTGGGACAGACGGCCAGGATTAC |
| | | CTGTGGGGGAAACAACATTGGAAG |
| | | TAAAAATGTGCACTGGTACCAGCA |
| | | GAAGCCAGGCCAGGCCCCTGTGCT |
| | | GGCCATCTATAGGAATAGCAACCG |
| | | GCCCTCTGGGATCCCTGAGCGATTC |
| | | ACTGGCTCCAACTCGGGGAACACG |
| | | GCCACCCTGACCATCAGCGGGACC |
| | | CAGGCTATGGATGAGGCTGACTATT |
| | | ACTGTCAGGCGTGGGACAGCAGCA |
| | | CTGTGGTATTCGGCGGAGGGACCA |
| | | AGCTGACCGTCCTA |
| 1138 | MPK20298-B5_SCFV | CAGGTGCAGCTGGTGGAGTCTGGG |
| | | GGAGGCGTGGTCCAGCCTGGGAGG |
| | | TCCCTGAGACTCTCCTGTGCAGCCT |
| | | CTGGATTCAACTTCAGTAACTATGG |
| | | CATGCACTGGGTCCGCCAGGCTCCA |
| | | GGCAAGGGGCTGGAATGGGTGGCA |
| | | GTTATATCATATGATGGAAGTAATA |
| | | AATATTATGCAGACTCCGTGAAGG |
| | | GCCGATTCACCATCTCCAGAGACA |
| | | ATTCCAAGAACACGCTGTATCTACA |
| | | AATGAACAGCCTGAGAGCTGAGGA |
| | | CACGGCTGTGTATTTCTGTGCGAGA |
| | | GTTTACTATGGTTCGGGGATTTATT |
| | | ATAAAAAGAGATACTACTACGGTA |
| | | TGGACGTCTGGGGCCAAGGGACCA |
| | | CGGTCACCGTCTCCTCAGGTGGTGG |
| | | TGGTTCTGGCGGCGGCGGCTCCGGT |
| | | GGTGGTGGTTCTTCATATGAGCTGA |
| | | CTCAGCCACCCTCAGTGTCAGTGGC |
| | | CCTGGGACAGACGGCCAGGATTAC |
| | | CTGTGGGGGAAACAACATTGGAAG |
| | | TCAAAATGTGCACTGGTACCAGCA |
| | | GAAGCCAGGCCAGGCCCCTGTGCT |
| | | GGTCATCTATAGGGATAGCAACCG |
| | | GCCCTCTGGGATCCCTGAGCGCTTC |
| | | TCTGGCTCCAAGTCGGGGAACACG |
| | | GCCACCCTGGCCATCAGCAGAGCC |
| | | CAAGCCGGGGATGAGTCTGACTAT |
| | | TACTGTCAGGTGTGGGACAGCAGT |
| | | GCCGTGGTATTCGGCGGAGGCACC |
| | | CAGCTGACCGTCCTA |
| 1139 | MPK20299-F2_SCFV | CAGGTGCAGCTGGTGGAGTCCGGG |
| | | GGAGGCGTGGTCCAGCCTGGGAGG |
| | | TCCCTGAGACTCTCCTGTGCAGCCT |
| | | CTGGATTCACCCTCAGTAGCTCTGG |
| | | CATGCACTGGGTCCGCCAGGCTCCA |
| | | GGCAAGGGGCTGGAGTGGGTGGCA |
| | | GTTATATCAAATGATGGAAGTAAT |
| | | AAATACTATGCGGACTCCGTGAAG |
| | | GGCCGGTTCACCATCTCCAGAGAC |
| | | GATTCCAAGAACACACTGTATCTGC |
| | | AAATGGACAGCCTGAGAACTGAGG |
| | | ACACGGCTGTGTATTACTGTGCGAA |
| | | AGTTTACTATGGTTCGGGTATTTAT |
| | | TATAAAAACAGGTACTACTACGGG |
| | | ATGGACGTCTGGGGCCAAGGGACC |
| | | ACGGTCACCGTCTCCTCAGGTGGTG |
| | | GTGGTTCTGGCGGCGGCGGCTCCG |
| | | GTGGTGGTGGTTCTTCATATGAGCT |
| | | GACTCAGCCACCCTCAGTGTCAGTG |
| | | GCCCTGGGACAGACGGCCAGGATT |
| | | TCCTGTGGGGGAAACAACATTGGA |
| | | AGTAAAAATGTGCACTGGTACCAG |
| | | CAGAAGCCAGGCCAGGCCCCTGTG |
| | | CTGGTCATGTATAGGGATAGCAAC |
| | | CGGCCCTCAGGGATCCCTGAGCGA |
| | | TTCTCTGGCTCCAACTCTGGGAACA |
| | | CAGCCACTCTGACCATCAGCGGGA |
| | | CCCAGGCTATGGATGAGGCTGACT |
| | | ATTACTGTCAGGCGTGGGACAGCG |
| | | GCACTGTGGTATTCGGCGGAGGGA |
| | | CCAAGCTGACCGTCCTA |
| 1140 | MPK20298-D4_SCFV | CAGGTGCAGCTGGTGGAGTCTGGG |
| | | GGAGGCGTGGTCCAGCCTGGGAGG |
| | | TCCCTGAGACTCTCCTGTGCAGCCT |
| | | CTGGATTCAACTTCAGTAACTATGG |
| | | CATGCACTGGGTCCGCCAGGCTCCA |
| | | GGCAAGGGGCTGGAATGGGTGGCA |
| | | GTTATATCATATGATGGAAGTAATA |
| | | AATATTATGCAGACTCCGTGAAGG |
| | | GCCGATTCACCATCTCCAGAGACA |
| | | ATTCCAAGAACACGCTGTATCTACA |
| | | AATGAACAGCCTGAGAGCTGAGGA |
| | | CACGGCTGTGTATTTCTGTGCGAGA |
| | | GTTTACTATGGTTCGGGGATTTATT |
| | | ATAAAAAGAGATACTACTACGGTA |
| | | TGGACGTCTGGGGCCAAGGGACCA |
| | | CGGTCACCGTCTCCTCAGGTGGTGG |
| | | TGGTTCTGGCGGCGGCGGCTCCGGT |
| | | GGTGGTGGTTCTTCATATGAGCTGA |
| | | CTCAGCCACCCTCAGTGTCAGTGGC |
| | | CCTGGGACAGACGGCCAGAATTAC |
| | | CTGTGGGGGAAACAACATTGGAGG |
| | | TAAAAATGTGCACTGGTACCAGCA |
| | | GAAGCCAGGCCAGGCCCCTGTGCT |
| | | GGTCATCTATAGGGATAGCAACCG |
| | | GCCCTCTGGGATCCCTGAGCGATTC |
| | | TCTGGCTCCAAGTCGGGGAACACG |
| | | GCCACCCTGACCATCAGCAGAGCC |
| | | CAAGCCGGGGATGAGTCTGACTAT |
| | | TACTGTCAGGTGTGGGACAGCAGC |
| | | ACTGTGGTATTCGGCGGAGGCACC |
| | | CAGCTGACCGTCCTA |
| 1141 | MPK20297-F5_SCFV | CAGGTGCAGCTGGTGGAGTCTGGG |
| | | GGAGGCGTGGTCCAGCCTGGGAGG |
| | | TCCCTGAGACTCTCCTGTGTAGTCT |
| | | CTGGATTCAACTTCAGTAGGAATGG |
| | | CATGCACTGGGTCCGCCAGGTTCCA |
| | | GGCAGGGGGCTAGATTGGGTGGCA |
| | | GTTATATCAAATGATGGAAGTAAT |
| | | AAATACTATGCAGACTCCGTGAAG |
| | | GGCCGATTCACCATCTCCAGAGAC |
| | | AATTCCAAGAACACGCTGTATCTGC |
| | | AAATGAACAGCCTGAGAGCTGAGG |
| | | ACACGGCTGTGTATTACTGTGCGAA |
| | | AGTTTACTATGGTTCGGGGATTTAT |
| | | TATAAAAATAACTACTATTACGGTA |
| | | TGGACGTCTGGGGCCAAGGGACCA |
| | | CGGTCACCGTCTCCTCAGGTGGTGG |
| | | TGGTTCTGGCGGCGGCGGCTCCGGT |
| | | GGTGGTGGTTCTTCATATGAGCTGA |
| | | CTCAGCCACTCTCAGTGTCAGTGGC |
| | | CCTGGGACAGACGGCCAGGATTAC |
| | | CTGTGGGGGAAACAACATTGGAAG |
| | | TAAAAATGTGCACTGGTACCAGCA |
| | | GAAGCCAGGCCAGGCCCCTGTGCT |
| | | GGTCATCTATAGAAATAGCAACCG |
| | | GCCCTCTGGGATCCCTGAGCGATTC |
| | | TCTGGCTCCAACTCGGGGAACACG |
| | | GCCACCCTGACCATCAGCAGAGCC |
| | | CAGGCCGGGGATGAGGCTGACTAT |
| | | TACTGTCAGGTGTGGGACAGCAGC |
| | | ACTGTGGTTTTCGGCGGTGGGACCA |
| | | AGCTGACCGTCCTA |
| 1142 | MPK20299-D9_SCFV | CAGGTGCAGCTGGTGGAGTCCGGG |
| | | GGAGGCTTGGTCAAGCCTGGAGGG |
| | | TCCCTGAGACTCTCCTGTGCAGCCT |
| | | CTGGATTCAACTTCAGTAGGAATGG |
| | | CATGCACTGGGTCCGCCAGGTTCCA |
| | | GGCAGGGGGCTAGATTGGGTGGCA |
| | | GTTATATCAAATGATGGAAGTAAT |
| | | AAATACTATGCAGACTCCGTGAAG |
| | | GGCCGATTCACCATCTCCAGAGAC |
| | | AATTCCAAGAACACGCTGTATCTGC |
| | | AAATGAACAGCCTGAGAGCTGAGG |
| | | ACACGGCTGTGTATTACTGTGCGAA |
| | | AGTTTACTATGGTTCGGGGATTTAT |
| | | TATAAAAATAACTACTACTACGGTA |
| | | TGGACGTCTGGGGCCAAGGGACCA |
| | | CGGTCACCGTCTCCTCAGGTGGTGG |
| | | TGGTTCTGGCGGCGGCGGCTCCGGT |
| | | GGTGGTGGTTCTTCATATGAGCTGA |
| | | CTCAGCCACCCTCAGTGTCAGTGGC |
| | | CCTGGGACAGACGGCCAGGATTTC |
| | | CTGTGGGGGAAACAACATTGAAAG |
| | | TAAAAATGTGCACTGGTACCAGCA |
| | | GAAGCCAGGCCAGGCCCCTGTGTT |
| | | GGTCATCTATAGGGATAGCAACCG |
| | | GCCCTCTGGGATCCCTGAGCGATTC |
| | | TCTGGCTCCAAGTCGGGGACCACG |
| | | GCCACCCTGACCATCAGCAGAGCC |
| | | CAAGCCGGGGATGAGGCTGAGTAT |
| | | TACTGTCAGGTGTGGGACAGCAGC |
| | | ACTGTGGTTTTCGGCGGAGGCACCC |
| | | AGCTGACCGTCCTA |
| 1143 | huCCR8_32360_huIgG1z | ATGGACATGAGGGTGCCCGCTCAG |
| | mAb(LC: K38R)_HC | CTCCTGGGGCTCCTGCTGCTGTGGC |
| | | TGAGAGGTGCGCGCTGTGAGGTGC |
| | | AGCTGGTGGAGTCTGGGGGAGGCT |
| | | TGGTAAAGCCTGGGGGGTCCCTGA |
| | | GACTCTCCTGTGCAGCCTCTGGATT |
| | | TACTTTCAGTAACGCCCGGATGGGC |
| | | TGGGTCCGCCAGGCTCCAGGGAAG |
| | | GGGCTGGAGTGGGTTGGCCGTATT |
| | | AAAAGCAAAACTGAAGGTGGGACA |
| | | AGAGACTACGCTGCACCCGTGAAA |
| | | GGCAGATTCACCATCTCAAGAGAT |
| | | GATTCAAAAAACACGCTGTATCTGC |
| | | AAATGAACAGCCTGAAAACCGAGG |
| | | ACACAGCCGTGTATTATTGTACCTC |
| | | GTATAGTGGGGTCTGGGGCCAAGG |
| | | GACAATGGTCACCGTGTCTTCAGCC |
| | | TCCACCAAGGGCCCATCGGTCTTCC |
| | | CCCTGGCACCCTCCTCCAAGAGCAC |
| | | CTCTGGGGGCACAGCGGCCCTGGG |
| | | CTGCCTGGTCAAGGACTACTTCCCC |
| | | GAACCGGTGACGGTGTCGTGGAAC |
| | | TCAGGCGCCCTGACCAGCGGCGTG |
| | | CACACCTTCCCGGCTGTCCTACAGT |
| | | CCTCAGGACTCTACTCCCTCAGCAG |
| | | CGTGGTGACCGTGCCCTCCAGCAGC |
| | | TTGGGCACCCAGACCTACATCTGCA |
| | | ACGTGAATCACAAGCCCAGCAACA |
| | | CCAAGGTGGACAAGAAAGTTGAGC |
| | | CCAAATCTTGTGACAAAACTCACAC |
| | | ATGCCCACCGTGCCCAGCACCTGA |
| | | ACTCCTGGGGGGACCGTCAGTCTTC |
| | | CTCTTCCCCCCAAAACCCAAGGACA |
| | | CCCTCATGATCTCCCGGACCCCTGA |
| | | GGTCACATGCGTGGTGGTGGACGT |
| | | GAGCCACGAAGACCCTGAGGTCAA |
| | | GTTCAACTGGTACGTGGACGGCGT |
| | | GGAGGTGCATAATGCCAAGACAAA |
| | | GCCGCGGGAGGAGCAGTACAACAG |
| | | CACGTACCGTGTGGTCAGCGTCCTC |
| | | ACCGTCCTGCACCAGGACTGGCTG |
| | | AATGGCAAGGAGTACAAGTGCAAG |
| | | GTGTCCAACAAAGCCCTCCCAGCCC |
| | | CCATCGAGAAAACCATCTCCAAAG |
| | | CCAAAGGGCAGCCCCGAGAACCAC |
| | | AGGTGTACACCCTGCCCCCATCCCG |
| | | GGAGGAGATGACCAAGAACCAGGT |
| | | CAGCCTGACCTGCCTGGTCAAAGG |
| | | CTTCTATCCCAGCGACATCGCCGTG |
| | | GAGTGGGAGAGCAATGGGCAGCCG |
| | | GAGAACAACTACAAGACCACGCCT |
| | | CCCGTGCTGGACTCCGACGGCTCCT |
| | | TCTTCCTCTATAGCAAGCTCACCGT |
| | | GGACAAGAGCAGGTGGCAGCAGGG |
| | | GAACGTCTTCTCATGCTCCGTGATG |
| | | CATGAGGCTCTGCACAACCACTAC |
| | | ACGCAGAAGAGCCTCTCCCTGTCTC |
| | | CGGGCAAATAG |
| 1144 | huCCR8_32360_huIgG1z | ATGGACATGAGGGTGCCCGCTCAG |
| | mAb(LC: K38R)_LC | CTCCTGGGGCTCCTGCTGCTGTGGC |
| | | TGAGAGGTGCGCGCTGTGACATCG |
| | | TGATGACCCAGTCTCCAGACTCCCT |
| | | GGCTGTGTCTCTGGGCGAGAGGGC |
| | | CACCATCAACTGCAAGTCCAGCCA |
| | | GAGTGTTTTATACAGTTCCAACAAT |
| | | AGAAACTACTTAGCTTGGTACCATC |
| | | AGAAACCAGGACAGTCTCCTAAGC |
| | | TGCTCATTTCCTGGGCATCTACCCG |
| | | GGAATCCGGGGTCCCTGACCGATTC |
| | | AGTGGCAGCGGGTCTGGGACAGAT |
| | | TTCACTCTCACCATCAACAGCCTGC |
| | | AGGCTGAAGATGTGGCAGTTTATTA |
| | | CTGTCAACAATATTATAGTATTCCG |
| | | ATCACTTTCGGCGGAGGGACCAAG |
| | | GTGGAGATCAAACGAACGGTGGCT |
| | | GCACCATCTGTCTTCATCTTCCCGC |
| | | CATCTGATGAGCAGTTGAAATCTGG |
| | | AACTGCCTCTGTTGTGTGCCTGCTG |
| | | AATAACTTCTATCCCAGAGAGGCC |
| | | AAAGTACAGTGGAAGGTGGATAAC |
| | | GCCCTCCAATCGGGTAACTCCCAGG |
| | | AGAGTGTCACAGAGCAGGACAGCA |
| | | AGGACAGCACCTACAGCCTCAGCA |
| | | GCACCCTGACGCTGAGCAAAGCAG |
| | | ACTACGAGAAACACAAAGTCTACG |
| | | CCTGCGAAGTCACCCATCAGGGCCT |
| | | GAGCTCGCCCGTCACAAAGAGCTT |
| | | CAACAGGGGAGAGTGTTAG |
| 1145 | anti- | ATGGACATGAGGGTGCCCGCTCAG |
| | huCCR8_44379(VH: D72S,VL: N67A_S68A_ | CTCCTGGGGCTCCTGCTGCTGTGGC |
| | M99G_W109F_S111A)_huIgG1z (mAb)_HC | TGAGAGGTGCGCGCTGTCAGGTGC |
| | | AGCTGGTGGAGTCCGGGGGAGGCG |
| | | TGGTCCAGCCTGGGAGGTCCCTGA |
| | | GACTCTCCTGTGCAGCCTCTGGATT |
| | | CACCTTCAGTAACTATGGCTTTCAC |
| | | TGGGTCCGCCAGACTCCAGGCAAG |
| | | GGGCTGGAGTGGGTGGCAGTTATC |
| | | TCATATGATGGAAGTAATAGATACT |
| | | ATGCAAGCTCCGTGAAGGGCCGAT |
| | | TCACCATCTCCAGAGACAATTCCAA |
| | | GAACACGCTGTATCTCCAAATGAA |
| | | CAGCCTGAGAGGTGAGGACACGGC |
| | | GCTATATTACTGTGCGAGAGTTTAC |
| | | TATGGTTCGGGGACTTATTATAAAA |
| | | ACCGCTACTACTACGGTATGGACGT |
| | | CTGGGGCCAAGGGACCACGGTCAC |
| | | CGTGTCCTCAGCCTCCACCAAGGGC |
| | | CCATCGGTCTTCCCCCTGGCACCCT |
| | | CCTCCAAGAGCACCTCTGGGGGCA |
| | | CAGCGGCCCTGGGCTGCCTGGTCA |
| | | AGGACTACTTCCCCGAACCGGTGA |
| | | CGGTGTCGTGGAACTCAGGCGCCCT |
| | | GACCAGCGGCGTGCACACCTTCCC |
| | | GGCTGTCCTACAGTCCTCAGGACTC |
| | | TACTCCCTCAGCAGCGTGGTGACCG |
| | | TGCCCTCCAGCAGCTTGGGCACCCA |
| | | GACCTACATCTGCAACGTGAATCAC |
| | | AAGCCCAGCAACACCAAGGTGGAC |
| | | AAGAAAGTTGAGCCCAAATCTTGT |
| | | GACAAAACTCACACATGCCCACCG |
| | | TGCCCAGCACCTGAACTCCTGGGG |
| | | GGACCGTCAGTCTTCCTCTTCCCCC |
| | | CAAAACCCAAGGACACCCTCATGA |
| | | TCTCCCGGACCCCTGAGGTCACATG |
| | | CGTGGTGGTGGACGTGAGCCACGA |
| | | AGACCCTGAGGTCAAGTTCAACTG |
| | | GTACGTGGACGGCGTGGAGGTGCA |
| | | TAATGCCAAGACAAAGCCGCGGGA |
| | | GGAGCAGTACAACAGCACGTACCG |
| | | TGTGGTCAGCGTCCTCACCGTCCTG |
| | | CACCAGGACTGGCTGAATGGCAAG |
| | | GAGTACAAGTGCAAGGTGTCCAAC |
| | | AAAGCCCTCCCAGCCCCCATCGAG |
| | | AAAACCATCTCCAAAGCCAAAGGG |
| | | CAGCCCCGAGAACCACAGGTGTAC |
| | | ACCCTGCCCCCATCCCGGGAGGAG |
| | | ATGACCAAGAACCAGGTCAGCCTG |
| | | ACCTGCCTGGTCAAAGGCTTCTATC |
| | | CCAGCGACATCGCCGTGGAGTGGG |
| | | AGAGCAATGGGCAGCCGGAGAACA |
| | | ACTACAAGACCACGCCTCCCGTGCT |
| | | GGACTCCGACGGCTCCTTCTTCCTC |
| | | TATAGCAAGCTCACCGTGGACAAG |
| | | AGCAGGTGGCAGCAGGGGAACGTC |
| | | TTCTCATGCTCCGTGATGCATGAGG |
| | | CTCTGCACAACCACTACACGCAGA |
| | | AGAGCCTCTCCCTGTCTCCGGGCAA |
| | | ATAG |
| 1146 | anti- | ATGGCCTGGGCTCTGCTGCTCCTCA |
| | huCCR8_44379(VH: D72S, VL: N67A_S68A_ | CCCTCCTCACTCAGGGCACAGGGTC |
| | M99G_W109F_S111A)_huIgG1z (mAb)_LC | CTGGGCCTCATATGAGCTGACTCAG |
| | | CCACCCTCAGTGTCAGTGGCCCTGG |
| | | GACAGACGGCCAGGATTACCTGTG |
| | | GGGGACACAACATTGGAAGTAAAG |
| | | GTGTGCACTGGTACCAGCAGAAGC |
| | | CAGGCCAGGCCCCTGTACTGGTCAT |
| | | CTATAGAGCCGCCAACCGGCCCTCT |
| | | GGGATCCCTGAGCGATTCTCTGGCT |
| | | CCAACTCTGGGAACACAGCCACTCT |
| | | GACCATCAGCGGGACCCAGGCTGG |
| | | CGATGAGGCTGACTATTACTGTCAG |
| | | GCGTTCGACGCCGGCACTGTGGTAT |
| | | TCGGCGGAGGCACCCAGCTGACCG |
| | | TCCTAGGTCAGCCCAAGGCTGCACC |
| | | CTCGGTCACTCTGTTCCCGCCCTCC |
| | | TCTGAGGAGCTTCAAGCCAACAAG |
| | | GCCACACTGGTGTGTCTCATCAGTG |
| | | ACTTCTACCCGGGAGCCGTGACAGT |
| | | GGCCTGGAAGGCAGATAGCAGCCC |
| | | CGTCAAGGCGGGAGTGGAAACCAC |
| | | CACACCCTCCAAACAAAGCAACAA |
| | | CAAGTACGCGGCCAGCAGCTATCT |
| | | GAGCCTGACGCCTGAGCAGTGGAA |
| | | GTCCCACAGAAGCTACAGCTGCCA |
| | | GGTCACGCATGAAGGGAGCACCGT |
| | | GGAGAAGACAGTGGCCCCTACAGA |
| | | ATGTTCATAG |
| 1147 | anti- | ATGGACATGAGGGTGCCCGCTCAG |
| | huCCR8_44379(VH: D61A_D72A, VL: N67Q_ | CTCCTGGGGCTCCTGCTGCTGTGGC |
| | M99E_W109F_S111A)_huIgG1z | TGAGAGGTGCGCGCTGTCAGGTGC |
| | (mAb)_HC | AGCTGGTGGAGTCCGGGGGAGGCG |
| | | TGGTCCAGCCTGGGAGGTCCCTGA |
| | | GACTCTCCTGTGCAGCCTCTGGATT |
| | | CACCTTCAGTAACTATGGCTTTCAC |
| | | TGGGTCCGCCAGACTCCAGGCAAG |
| | | GGGCTGGAGTGGGTGGCAGTTATC |
| | | TCATATGCCGGAAGTAATAGATACT |
| | | ATGCAGCCTCCGTGAAGGGCCGAT |
| | | TCACCATCTCCAGAGACAATTCCAA |
| | | GAACACGCTGTATCTCCAAATGAA |
| | | CAGCCTGAGAGGTGAGGACACGGC |
| | | GCTATATTACTGTGCGAGAGTTTAC |
| | | TATGGTTCGGGGACTTATTATAAAA |
| | | ACCGCTACTACTACGGTATGGACGT |
| | | CTGGGGCCAAGGGACCACGGTCAC |
| | | CGTGTCCTCAGCCTCCACCAAGGGC |
| | | CCATCGGTCTTCCCCCTGGCACCCT |
| | | CCTCCAAGAGCACCTCTGGGGGCA |
| | | CAGCGGCCCTGGGCTGCCTGGTCA |
| | | AGGACTACTTCCCCGAACCGGTGA |
| | | CGGTGTCGTGGAACTCAGGCGCCCT |
| | | GACCAGCGGCGTGCACACCTTCCC |
| | | GGCTGTCCTACAGTCCTCAGGACTC |
| | | TACTCCCTCAGCAGCGTGGTGACCG |
| | | TGCCCTCCAGCAGCTTGGGCACCCA |
| | | GACCTACATCTGCAACGTGAATCAC |
| | | AAGCCCAGCAACACCAAGGTGGAC |
| | | AAGAAAGTTGAGCCCAAATCTTGT |
| | | GACAAAACTCACACATGCCCACCG |
| | | TGCCCAGCACCTGAACTCCTGGGG |
| | | GGACCGTCAGTCTTCCTCTTCCCCC |
| | | CAAAACCCAAGGACACCCTCATGA |
| | | TCTCCCGGACCCCTGAGGTCACATG |
| | | CGTGGTGGTGGACGTGAGCCACGA |
| | | AGACCCTGAGGTCAAGTTCAACTG |
| | | GTACGTGGACGGCGTGGAGGTGCA |
| | | TAATGCCAAGACAAAGCCGCGGGA |
| | | GGAGCAGTACAACAGCACGTACCG |
| | | TGTGGTCAGCGTCCTCACCGTCCTG |
| | | CACCAGGACTGGCTGAATGGCAAG |
| | | GAGTACAAGTGCAAGGTGTCCAAC |
| | | AAAGCCCTCCCAGCCCCCATCGAG |
| | | AAAACCATCTCCAAAGCCAAAGGG |
| | | CAGCCCCGAGAACCACAGGTGTAC |
| | | ACCCTGCCCCCATCCCGGGAGGAG |
| | | ATGACCAAGAACCAGGTCAGCCTG |
| | | ACCTGCCTGGTCAAAGGCTTCTATC |
| | | CCAGCGACATCGCCGTGGAGTGGG |
| | | AGAGCAATGGGCAGCCGGAGAACA |
| | | ACTACAAGACCACGCCTCCCGTGCT |
| | | GGACTCCGACGGCTCCTTCTTCCTC |
| | | TATAGCAAGCTCACCGTGGACAAG |
| | | AGCAGGTGGCAGCAGGGGAACGTC |
| | | TTCTCATGCTCCGTGATGCATGAGG |
| | | CTCTGCACAACCACTACACGCAGA |
| | | AGAGCCTCTCCCTGTCTCCGGGCAA |
| | | ATAG |
| 1148 | anti- | ATGGCCTGGGCTCTGCTGCTCCTCA |
| | huCCR8_44379(VH: D61A_D72A, VL: N67Q_ | CCCTCCTCACTCAGGGCACAGGGTC |
| | M99E_W109F_S111A)_huIgG1z | CTGGGCCTCATATGAGCTGACTCAG |
| | (mAb)_LC | CCACCCTCAGTGTCAGTGGCCCTGG |
| | | GACAGACGGCCAGGATTACCTGTG |
| | | GGGGACACAACATTGGAAGTAAAG |
| | | GTGTGCACTGGTACCAGCAGAAGC |
| | | CAGGCCAGGCCCCTGTACTGGTCAT |
| | | CTATAGACAGAGCAACCGGCCCTC |
| | | TGGGATCCCTGAGCGATTCTCTGGC |
| | | TCCAACTCTGGGAACACAGCCACTC |
| | | TGACCATCAGCGGGACCCAGGCTG |
| | | AAGATGAGGCTGACTATTACTGTCA |
| | | GGCGTTCGACGCCGGCACTGTGGT |
| | | ATTCGGCGGAGGCACCCAGCTGAC |
| | | CGTCCTAGGTCAGCCCAAGGCTGC |
| | | ACCCTCGGTCACTCTGTTCCCGCCC |
| | | TCCTCTGAGGAGCTTCAAGCCAACA |
| | | AGGCCACACTGGTGTGTCTCATCAG |
| | | TGACTTCTACCCGGGAGCCGTGACA |
| | | GTGGCCTGGAAGGCAGATAGCAGC |
| | | CCCGTCAAGGCGGGAGTGGAAACC |
| | | ACCACACCCTCCAAACAAAGCAAC |
| | | AACAAGTACGCGGCCAGCAGCTAT |
| | | CTGAGCCTGACGCCTGAGCAGTGG |
| | | AAGTCCCACAGAAGCTACAGCTGC |
| | | CAGGTCACGCATGAAGGGAGCACC |
| | | GTGGAGAAGACAGTGGCCCCTACA |
| | | GAATGTTCATAG |
| 1149 | anti- | ATGGACATGAGGGTGCCCGCTCAG |
| | huCCR8_44379(VH: D61S, VL: N67Q_M99G | CTCCTGGGGCTCCTGCTGCTGTGGC |
| | _W109F_S111A) huIgG1z (mAb)_HC | TGAGAGGTGCGCGCTGTCAGGTGC |
| | | AGCTGGTGGAGTCCGGGGGAGGCG |
| | | TGGTCCAGCCTGGGAGGTCCCTGA |
| | | GACTCTCCTGTGCAGCCTCTGGATT |
| | | CACCTTCAGTAACTATGGCTTTCAC |
| | | TGGGTCCGCCAGACTCCAGGCAAG |
| | | GGGCTGGAGTGGGTGGCAGTTATC |
| | | TCATATAGCGGAAGTAATAGATAC |
| | | TATGCAGACTCCGTGAAGGGCCGA |
| | | TTCACCATCTCCAGAGACAATTCCA |
| | | AGAACACGCTGTATCTCCAAATGA |
| | | ACAGCCTGAGAGGTGAGGACACGG |
| | | CGCTATATTACTGTGCGAGAGTTTA |
| | | CTATGGTTCGGGGACTTATTATAAA |
| | | AACCGCTACTACTACGGTATGGAC |
| | | GTCTGGGGCCAAGGGACCACGGTC |
| | | ACCGTGTCCTCAGCCTCCACCAAGG |
| | | GCCCATCGGTCTTCCCCCTGGCACC |
| | | CTCCTCCAAGAGCACCTCTGGGGGC |
| | | ACAGCGGCCCTGGGCTGCCTGGTC |
| | | AAGGACTACTTCCCCGAACCGGTG |
| | | ACGGTGTCGTGGAACTCAGGCGCC |
| | | CTGACCAGCGGCGTGCACACCTTCC |
| | | CGGCTGTCCTACAGTCCTCAGGACT |
| | | CTACTCCCTCAGCAGCGTGGTGACC |
| | | GTGCCCTCCAGCAGCTTGGGCACCC |
| | | AGACCTACATCTGCAACGTGAATC |
| | | ACAAGCCCAGCAACACCAAGGTGG |
| | | ACAAGAAAGTTGAGCCCAAATCTT |
| | | GTGACAAAACTCACACATGCCCAC |
| | | CGTGCCCAGCACCTGAACTCCTGGG |
| | | GGGACCGTCAGTCTTCCTCTTCCCC |
| | | CCAAAACCCAAGGACACCCTCATG |
| | | ATCTCCCGGACCCCTGAGGTCACAT |
| | | GCGTGGTGGTGGACGTGAGCCACG |
| | | AAGACCCTGAGGTCAAGTTCAACT |
| | | GGTACGTGGACGGCGTGGAGGTGC |
| | | ATAATGCCAAGACAAAGCCGCGGG |
| | | AGGAGCAGTACAACAGCACGTACC |
| | | GTGTGGTCAGCGTCCTCACCGTCCT |
| | | GCACCAGGACTGGCTGAATGGCAA |
| | | GGAGTACAAGTGCAAGGTGTCCAA |
| | | CAAAGCCCTCCCAGCCCCCATCGA |
| | | GAAAACCATCTCCAAAGCCAAAGG |
| | | GCAGCCCCGAGAACCACAGGTGTA |
| | | CACCCTGCCCCCATCCCGGGAGGA |
| | | GATGACCAAGAACCAGGTCAGCCT |
| | | GACCTGCCTGGTCAAAGGCTTCTAT |
| | | CCCAGCGACATCGCCGTGGAGTGG |
| | | GAGAGCAATGGGCAGCCGGAGAAC |
| | | AACTACAAGACCACGCCTCCCGTG |
| | | CTGGACTCCGACGGCTCCTTCTTCC |
| | | TCTATAGCAAGCTCACCGTGGACA |
| | | AGAGCAGGTGGCAGCAGGGGAACG |
| | | TCTTCTCATGCTCCGTGATGCATGA |
| | | GGCTCTGCACAACCACTACACGCA |
| | | GAAGAGCCTCTCCCTGTCTCCGGGC |
| | | AAATAG |
| 1150 | anti- | ATGGCCTGGGCTCTGCTGCTCCTCA |
| | huCCR8_44379(VH: D61S, VL: N67Q_M99G | CCCTCCTCACTCAGGGCACAGGGTC |
| | _109F_S111A)_huIgG1z (mAb)_LC | CTGGGCCTCATATGAGCTGACTCAG |
| | | CCACCCTCAGTGTCAGTGGCCCTGG |
| | | GACAGACGGCCAGGATTACCTGTG |
| | | GGGGACACAACATTGGAAGTAAAG |
| | | GTGTGCACTGGTACCAGCAGAAGC |
| | | CAGGCCAGGCCCCTGTACTGGTCAT |
| | | CTATAGACAGAGCAACCGGCCCTC |
| | | TGGGATCCCTGAGCGATTCTCTGGC |
| | | TCCAACTCTGGGAACACAGCCACTC |
| | | TGACCATCAGCGGGACCCAGGCTG |
| | | GCGATGAGGCTGACTATTACTGTCA |
| | | GGCGTTCGACGCCGGCACTGTGGT |
| | | ATTCGGCGGAGGCACCCAGCTGAC |
| | | CGTCCTAGGTCAGCCCAAGGCTGC |
| | | ACCCTCGGTCACTCTGTTCCCGCCC |
| | | TCCTCTGAGGAGCTTCAAGCCAACA |
| | | AGGCCACACTGGTGTGTCTCATCAG |
| | | TGACTTCTACCCGGGAGCCGTGACA |
| | | GTGGCCTGGAAGGCAGATAGCAGC |
| | | CCCGTCAAGGCGGGAGTGGAAACC |
| | | ACCACACCCTCCAAACAAAGCAAC |
| | | AACAAGTACGCGGCCAGCAGCTAT |
| | | CTGAGCCTGACGCCTGAGCAGTGG |
| | | AAGTCCCACAGAAGCTACAGCTGC |
| | | CAGGTCACGCATGAAGGGAGCACC |
| | | GTGGAGAAGACAGTGGCCCCTACA |
| | | GAATGTTCATAG |
| 1151 | Hu anti-huCCR8 LIBC315615-1 HuIgG1z | ATGGCCTGGGCTCTGCTGCTCCTCA |
| | mAb_LC | CCCTCCTCACTCAGGGCACAGGGTC |
| | | CTGGGCCTCCTATGAACTGACTCAG |
| | | CCACTCTCAGTGTCAGTGGCCCTGG |
| | | GACAGACGGCCAGGATTACCTGTG |
| | | GGGGACACAACATTGGAAGTAAAG |
| | | GTGTGCACTGGTACCAGCAGAAGC |
| | | CAGGCCAGGCCCCTGTGCTGGTCAT |
| | | CTATAGAAATAGCAACCGGCCCTCT |
| | | GGGATCCCTGAGCGATTCTCTGGCT |
| | | CCAACTCGGGGAACACGGCCACCC |
| | | TGACCATCAGCAGAGCCCAAGCCG |
| | | GGGATGAGGCTGACTATTACTGTCA |
| | | GGTGTGGGACATCAGCACTGTGGTT |
| | | TTCGGCGGAGGGACCGAGCTGACC |
| | | GTCCTAGGTCAGCCCAAGGCTGCA |
| | | CCCTCGGTCACTCTGTTCCCGCCCT |
| | | CCTCTGAGGAGCTTCAAGCCAACA |
| | | AGGCCACACTGGTGTGTCTCATCAG |
| | | TGACTTCTACCCGGGAGCCGTGACA |
| | | GTGGCCTGGAAGGCAGATAGCAGC |
| | | CCCGTCAAGGCGGGAGTGGAAACC |
| | | ACCACACCCTCCAAACAAAGCAAC |
| | | AACAAGTACGCGGCCAGCAGCTAT |
| | | CTGAGCCTGACGCCTGAGCAGTGG |
| | | AAGTCCCACAGAAGCTACAGCTGC |
| | | CAGGTCACGCATGAAGGGAGCACC |
| | | GTGGAGAAGACAGTGGCCCCTACA |
| | | GAATGTTCATAG |
| 1152 | Hu anti-huCCR8 LIBC315615-1 HuIgG1z | ATGGACATGAGGGTGCCCGCTCAG |
| | mAb_HC | CTCCTGGGGCTCCTGCTGCTGTGGC |
| | | TGAGAGGTGCGCGCTGTCAGGTGC |
| | | AGCTGGTGGAGTCTGGGGGAGGCG |
| | | TGGCCCAGCCTGGGAGGTCCCTGA |
| | | GACTCTCCTGTGCAGCCTCTGGATT |
| | | CAACTTCAGTAACTGTGGCATGCAC |
| | | TGGGTCCGCCAGGCTCCAGGCAAG |
| | | GGGCTGGAGTGGGTGGCAGTTATA |
| | | TCATATGATGGAGGTAATAAATATC |
| | | ATGCGGACTCCGTGAAGGGCCGGT |
| | | TCACCATCTCCAGAGACGATTCCAA |
| | | GAACACACTGTATCTGCAAATGGA |
| | | CAGCCTGAGAACTGAGGACACGGC |
| | | TGTGTATTACTGTGCGAAAGTTTAC |
| | | TATGGTTCGGGTATTTATTATAAAA |
| | | ACAGGTACTACTACGGGATGGACG |
| | | TCtGGGGCCAAGGGACCACGGTCAC |
| | | CGTCTCCTCAGCCTCCACCAAGGGC |
| | | CCATCGGTCTTCCCCCTGGCACCCT |
| | | CCTCCAAGAGCACCTCTGGGGGCA |
| | | CAGCGGCCCTGGGCTGCCTGGTCA |
| | | AGGACTACTTCCCCGAACCGGTGA |
| | | CGGTGTCGTGGAACTCAGGCGCCCT |
| | | GACCAGCGGCGTGCACACCTTCCC |
| | | GGCTGTCCTACAGTCCTCAGGACTC |
| | | TACTCCCTCAGCAGCGTGGTGACCG |
| | | TGCCCTCCAGCAGCTTGGGCACCCA |
| | | GACCTACATCTGCAACGTGAATCAC |
| | | AAGCCCAGCAACACCAAGGTGGAC |
| | | AAGAAAGTTGAGCCCAAATCTTGT |
| | | GACAAAACTCACACATGCCCACCG |
| | | TGCCCAGCACCTGAACTCCTGGGG |
| | | GGACCGTCAGTCTTCCTCTTCCCCC |
| | | CAAAACCCAAGGACACCCTCATGA |
| | | TCTCCCGGACCCCTGAGGTCACATG |
| | | CGTGGTGGTGGACGTGAGCCACGA |
| | | AGACCCTGAGGTCAAGTTCAACTG |
| | | GTACGTGGACGGCGTGGAGGTGCA |
| | | TAATGCCAAGACAAAGCCGCGGGA |
| | | GGAGCAGTACAACAGCACGTACCG |
| | | TGTGGTCAGCGTCCTCACCGTCCTG |
| | | CACCAGGACTGGCTGAATGGCAAG |
| | | GAGTACAAGTGCAAGGTGTCCAAC |
| | | AAAGCCCTCCCAGCCCCCATCGAG |
| | | AAAACCATCTCCAAAGCCAAAGGG |
| | | CAGCCCCGAGAACCACAGGTGTAC |
| | | ACCCTGCCCCCATCCCGGGAGGAG |
| | | ATGACCAAGAACCAGGTCAGCCTG |
| | | ACCTGCCTGGTCAAAGGCTTCTATC |
| | | CCAGCGACATCGCCGTGGAGTGGG |
| | | AGAGCAATGGGCAGCCGGAGAACA |
| | | ACTACAAGACCACGCCTCCCGTGCT |
| | | GGACTCCGACGGCTCCTTCTTCCTC |
| | | TATAGCAAGCTCACCGTGGACAAG |
| | | AGCAGGTGGCAGCAGGGGAACGTC |
| | | TTCTCATGCTCCGTGATGCATGAGG |
| | | CTCTGCACAACCACTACACGCAGA |
| | | AGAGCCTCTCCCTGTCTCCGGGCAA |
| | | ATAG |
| 1153 | Hu anti-huCCR8 LIBC317152-1 HuIgG1z | ATGGCCTGGGCTCTGCTGCTCCTCA |
| | mAb_LC | CCCTCCTCACTCAGGGCACAGGGTC |
| | | CTGGGCCTCCTATGAGCTGACTCAG |
| | | CCACTCTCAGTGTCAGTGGCCCTGG |
| | | GACAGACGGCCAGGATTACCTGTG |
| | | GGGGACACAACATTGGAAGTAAAG |
| | | GTGTGCACTGGTACCAGCAGAAGC |
| | | CAGGCCAGGCCCCTGTGCTGGTCAT |
| | | CTATAGAAATAGCAACCGGCCCTCT |
| | | GGGATCCCTGAGCGATTCTCTGGCT |
| | | CCAACTCGGGGAAAACGGCCACCC |
| | | TGACCATCAGCAGAGCCCAAGCCG |
| | | GGGATGAGGCTGACTATTACTGTCA |
| | | GGTGTGGGACAGCAGCACTGTGGT |
| | | TTTCGGCGGAGGGACCGAGCTGAC |
| | | CGTCCTAGGTCAGCCCAAGGCTGC |
| | | ACCCTCGGTCACTCTGTTCCCGCCC |
| | | TCCTCTGAGGAGCTTCAAGCCAACA |
| | | AGGCCACACTGGTGTGTCTCATCAG |
| | | TGACTTCTACCCGGGAGCCGTGACA |
| | | GTGGCCTGGAAGGCAGATAGCAGC |
| | | CCCGTCAAGGCGGGAGTGGAAACC |
| | | ACCACACCCTCCAAACAAAGCAAC |
| | | AACAAGTACGCGGCCAGCAGCTAT |
| | | CTGAGCCTGACGCCTGAGCAGTGG |
| | | AAGTCCCACAGAAGCTACAGCTGC |
| | | CAGGTCACGCATGAAGGGAGCACC |
| | | GTGGAGAAGACAGTGGCCCCTACA |
| | | GAATGTTCATAG |
| 1154 | Hu anti-huCCR8 LIBC317152-1 HuIgG1z | ATGGACATGAGGGTGCCCGCTCAG |
| | mAb_HC | CTCCTGGGGCTCCTGCTGCTGTGGC |
| | | TGAGAGGTGCGCGCTGTCAGGTGC |
| | | AGCTGGTGGAGTCTGGGGGAGGCG |
| | | TGGCCCAGCCTGGGAGGTCCCTGA |
| | | GACTCTCCTGTGCAGCCTCTGGATT |
| | | CAACTTCAGTAACTGTGGCATGCAC |
| | | TGGGTCCGCCAGGCTCCAGGCAAG |
| | | GGGCTGGAGTGGGTGGCAGTTATA |
| | | TCATATGATGGAGGTAATAAATATT |
| | | ATGCGGACTCCGTGAAGGGCCGGT |
| | | TCACCATCTCCAGAGACGATTCCAA |
| | | GAACACACTGTATCTGCAAATGGA |
| | | CAGCCTGAGAACTGAGGACACGGC |
| | | TGTGTATTACTGTGCGAAAGTTTAC |
| | | TATGGTTCGGGTATTTATTATAAAA |
| | | ACAGGTATTACTACGGGATGGACG |
| | | TCTGGGGCCAAGGGACCACGGTCA |
| | | CCGTCTCCTCAGCCTCCACCAAGGG |
| | | CCCATCGGTCTTCCCCCTGGCACCC |
| | | TCCTCCAAGAGCACCTCTGGGGGC |
| | | ACAGCGGCCCTGGGCTGCCTGGTC |
| | | AAGGACTACTTCCCCGAACCGGTG |
| | | ACGGTGTCGTGGAACTCAGGCGCC |
| | | CTGACCAGCGGCGTGCACACCTTCC |
| | | CGGCTGTCCTACAGTCCTCAGGACT |
| | | CTACTCCCTCAGCAGCGTGGTGACC |
| | | GTGCCCTCCAGCAGCTTGGGCACCC |
| | | AGACCTACATCTGCAACGTGAATC |
| | | ACAAGCCCAGCAACACCAAGGTGG |
| | | ACAAGAAAGTTGAGCCCAAATCTT |
| | | GTGACAAAACTCACACATGCCCAC |
| | | CGTGCCCAGCACCTGAACTCCTGGG |
| | | GGGACCGTCAGTCTTCCTCTTCCCC |
| | | CCAAAACCCAAGGACACCCTCATG |
| | | ATCTCCCGGACCCCTGAGGTCACAT |
| | | GCGTGGTGGTGGACGTGAGCCACG |
| | | AAGACCCTGAGGTCAAGTTCAACT |
| | | GGTACGTGGACGGCGTGGAGGTGC |
| | | ATAATGCCAAGACAAAGCCGCGGG |
| | | AGGAGCAGTACAACAGCACGTACC |
| | | GTGTGGTCAGCGTCCTCACCGTCCT |
| | | GCACCAGGACTGGCTGAATGGCAA |
| | | GGAGTACAAGTGCAAGGTGTCCAA |
| | | CAAAGCCCTCCCAGCCCCCATCGA |
| | | GAAAACCATCTCCAAAGCCAAAGG |
| | | GCAGCCCCGAGAACCACAGGTGTA |
| | | CACCCTGCCCCCATCCCGGGAGGA |
| | | GATGACCAAGAACCAGGTCAGCCT |
| | | GACCTGCCTGGTCAAAGGCTTCTAT |
| | | CCCAGCGACATCGCCGTGGAGTGG |
| | | GAGAGCAATGGGCAGCCGGAGAAC |
| | | AACTACAAGACCACGCCTCCCGTG |
| | | CTGGACTCCGACGGCTCCTTCTTCC |
| | | TCTATAGCAAGCTCACCGTGGACA |
| | | AGAGCAGGTGGCAGCAGGGGAACG |
| | | TCTTCTCATGCTCCGTGATGCATGA |
| | | GGCTCTGCACAACCACTACACGCA |
| | | GAAGAGCCTCTCCCTGTCTCCGGGC |
| | | AAATAG |
| 1155 | Hu anti-huCCR8 LIBC317471-1 HuIgG1z | ATGGCCTGGGCTCTGCTGCTCCTCA |
| | mAb_LC | CCCTCCTCACTCAGGGCACAGGGTC |
| | | CTGGGCCTCCTATGAGCTGACTCAG |
| | | CCACTCTCAGTGTCAGTGGCCCTGG |
| | | GACAGACGGCCAGGATTACCTGTG |
| | | GGGGAAACAACATTGGAAGTAAAA |
| | | ATGTGCACTGGTACCAGAAGAGGC |
| | | CAGGCCAGGCCCCTGTGCTGGTCAT |
| | | CTATAGGGATAGCAACCGGCCCTCT |
| | | GGGATCCCTGAGCGATTCTCTGGCT |
| | | CCAAGTCGGGGAACACGGCCACCC |
| | | TGACCATCAGCAGAGCCCAAGCCG |
| | | GGGATGAGGCTGACTATTACTGTCA |
| | | GGTGTGGGACAGCAACACTGTGGT |
| | | TTTCGGCGGAGGGACCAACCTGAC |
| | | CGTCCTAGGTCAGCCCAAGGCTGC |
| | | ACCCTCGGTCACTCTGTTCCCGCCC |
| | | TCCTCTGAGGAGCTTCAAGCCAACA |
| | | AGGCCACACTGGTGTGTCTCATCAG |
| | | TGACTTCTACCCGGGAGCCGTGACA |
| | | GTGGCCTGGAAGGCAGATAGCAGC |
| | | CCCGTCAAGGCGGGAGTGGAAACC |
| | | ACCACACCCTCCAAACAAAGCAAC |
| | | AACAAGTACGCGGCCAGCAGCTAT |
| | | CTGAGCCTGACGCCTGAGCAGTGG |
| | | AAGTCCCACAGAAGCTACAGCTGC |
| | | CAGGTCACGCATGAAGGGAGCACC |
| | | GTGGAGAAGACAGTGGCCCCTACA |
| | | GAATGTTCATAG |
| 1156 | Hu anti-huCCR8 LIBC317471-1 HuIgG1z | ATGGACATGAGGGTGCCCGCTCAG |
| | mAb_HC | CTCCTGGGGCTCCTGCTGCTGTGGC |
| | | TGAGAGGTGCGCGCTGTCAGGTGC |
| | | AGCTGGTGGAGTCTGGGGGAGGCG |
| | | TGGTCCAGCCTGGGAGGTCCCTGA |
| | | GACTCTCCTGTGTAGTCTCTGGATT |
| | | CAACTTCAGTAACAATGGCATGCA |
| | | CTGGGTCCGCCAGGCTCCAGGCAA |
| | | GGGACTGGAGTGGGTGGCAGTTAT |
| | | TTCAAATGATGGCAGTAATAAATAT |
| | | TATGCAGATTCCGTGAGGGGCCGA |
| | | TTCACCATCTCCAGAGACAATTCCA |
| | | AGAACACGCTGTATCTGCAAATGA |
| | | ACAGCCTGAGAGCTGAGGACACGG |
| | | CTGTGTATTCCTGTGCGAAAGTTTA |
| | | CTATGGTTCGGGAATTTATTACAAA |
| | | AATAACTACTACTACGGTATGGAC |
| | | GTCTGGGGCCAAGGGACCACGGTC |
| | | ACCGTCTCCTCAGCCTCCACCAAGG |
| | | GCCCATCGGTCTTCCCCCTGGCACC |
| | | CTCCTCCAAGAGCACCTCTGGGGGC |
| | | ACAGCGGCCCTGGGCTGCCTGGTC |
| | | AAGGACTACTTCCCCGAACCGGTG |
| | | ACGGTGTCGTGGAACTCAGGCGCC |
| | | CTGACCAGCGGCGTGCACACCTTCC |
| | | CGGCTGTCCTACAGTCCTCAGGACT |
| | | CTACTCCCTCAGCAGCGTGGTGACC |
| | | GTGCCCTCCAGCAGCTTGGGCACCC |
| | | AGACCTACATCTGCAACGTGAATC |
| | | ACAAGCCCAGCAACACCAAGGTGG |
| | | ACAAGAAAGTTGAGCCCAAATCTT |
| | | GTGACAAAACTCACACATGCCCAC |
| | | CGTGCCCAGCACCTGAACTCCTGGG |
| | | GGGACCGTCAGTCTTCCTCTTCCCC |
| | | CCAAAACCCAAGGACACCCTCATG |
| | | ATCTCCCGGACCCCTGAGGTCACAT |
| | | GCGTGGTGGTGGACGTGAGCCACG |
| | | AAGACCCTGAGGTCAAGTTCAACT |
| | | GGTACGTGGACGGCGTGGAGGTGC |
| | | ATAATGCCAAGACAAAGCCGCGGG |
| | | AGGAGCAGTACAACAGCACGTACC |
| | | GTGTGGTCAGCGTCCTCACCGTCCT |
| | | GCACCAGGACTGGCTGAATGGCAA |
| | | GGAGTACAAGTGCAAGGTGTCCAA |
| | | CAAAGCCCTCCCAGCCCCCATCGA |
| | | GAAAACCATCTCCAAAGCCAAAGG |
| | | GCAGCCCCGAGAACCACAGGTGTA |
| | | CACCCTGCCCCCATCCCGGGAGGA |
| | | GATGACCAAGAACCAGGTCAGCCT |
| | | GACCTGCCTGGTCAAAGGCTTCTAT |
| | | CCCAGCGACATCGCCGTGGAGTGG |
| | | GAGAGCAATGGGCAGCCGGAGAAC |
| | | AACTACAAGACCACGCCTCCCGTG |
| | | CTGGACTCCGACGGCTCCTTCTTCC |
| | | TCTATAGCAAGCTCACCGTGGACA |
| | | AGAGCAGGTGGCAGCAGGGGAACG |
| | | TCTTCTCATGCTCCGTGATGCATGA |
| | | GGCTCTGCACAACCACTACACGCA |
| | | GAAGAGCCTCTCCCTGTCTCCGGGC |
| | | AAATAG |
| 1157 | Hu anti-huCCR8 LIBC317977-1 HuIgG1z | ATGGCCTGGGCTCTGCTGCTCCTCA |
| | mAb_LC | CCCTCCTCACTCAGGGCACAGGGTC |
| | | CTGGGCCTcctATGAGCTGACTCAGC |
| | | CACTCTCAGTGTCAGTGGCCCTGGG |
| | | ACAGACGGCCAGGATTACCTGTGG |
| | | GGGAAACAACATTGGAAGTAAAAA |
| | | TGTGCACTGGTACCAGCAGAAGGC |
| | | AGGCCAGGCCCCTGTGCAGGTCAT |
| | | CTATAGAAATAGCAACCGGCCCTCT |
| | | GGGATCCCTGAGCGATTCTCTGGCT |
| | | CCAACTCGGGGAACACGGCCACCC |
| | | TGACCATCAGCAGAGCCCAGGCCG |
| | | GGGATGAGGCTGACTATTACTGTCA |
| | | GGTGTGGGACAGCAGCACTGTGGT |
| | | TTTCGGCGGTGGGACCAAGCTGAC |
| | | CGTCCTAGGTCAGCCCAAGGCTGC |
| | | ACCCTCGGTCACTCTGTTCCCGCCC |
| | | TCCTCTGAGGAGCTTCAAGCCAACA |
| | | AGGCCACACTGGTGTGTCTCATCAG |
| | | TGACTTCTACCCGGGAGCCGTGACA |
| | | GTGGCCTGGAAGGCAGATAGCAGC |
| | | CCCGTCAAGGCGGGAGTGGAAACC |
| | | ACCACACCCTCCAAACAAAGCAAC |
| | | AACAAGTACGCGGCCAGCAGCTAT |
| | | CTGAGCCTGACGCCTGAGCAGTGG |
| | | AAGTCCCACAGAAGCTACAGCTGC |
| | | CAGGTCACGCATGAAGGGAGCACC |
| | | GTGGAGAAGACAGTGGCCCCTACA |
| | | GAATGTTCATAG |
| 1158 | Hu anti-huCCR8 LIBC317977-1 HuIgG1z | ATGGACATGAGGGTGCCCGCTCAG |
| | mAb_HC | CTCCTGGGGCTCCTGCTGCTGTGGC |
| | | TGAGAGGTGCGCGCTGTCAGGTGC |
| | | AGCTGGTGGAGTCTGGGGGAGGCG |
| | | TGGTCCAGCCTGGGAGGTCCCTGA |
| | | GACTCTCCTGTGCAGCCTCTGGATT |
| | | CAACTTCAATACCTATGGCATGCAC |
| | | TGGGTCCGCCAGGCTCCAGGCAAG |
| | | GGGCTGGAGTGGGTGGCAGTTATA |
| | | TCATATGATGGAAGTAATAAATATT |
| | | ATGCAGACTCCGTGAAGGGCCGAT |
| | | TCACCATCTCCAGAGACAATTCCAA |
| | | GAGCACGCTGTATCTGCAAATGAA |
| | | CAGCCTGAGAGCTGAGGACACGGC |
| | | TGTGTATTACTGTGCGAGAGTTTAC |
| | | TATGGTTCGGGGAGTTATTATAAAA |
| | | AGAATTACTACTACGGTATGGACGT |
| | | CTGGGGCCAAGGGACCACGGTCAC |
| | | CGTCTCCTCAGCCTCCACCAAGGGC |
| | | CCATCGGTCTTCCCCCTGGCACCCT |
| | | CCTCCAAGAGCACCTCTGGGGGCA |
| | | CAGCGGCCCTGGGCTGCCTGGTCA |
| | | AGGACTACTTCCCCGAACCGGTGA |
| | | CGGTGTCGTGGAACTCAGGCGCCCT |
| | | GACCAGCGGCGTGCACACCTTCCC |
| | | GGCTGTCCTACAGTCCTCAGGACTC |
| | | TACTCCCTCAGCAGCGTGGTGACCG |
| | | TGCCCTCCAGCAGCTTGGGCACCCA |
| | | GACCTACATCTGCAACGTGAATCAC |
| | | AAGCCCAGCAACACCAAGGTGGAC |
| | | AAGAAAGTTGAGCCCAAATCTTGT |
| | | GACAAAACTCACACATGCCCACCG |
| | | TGCCCAGCACCTGAACTCCTGGGG |
| | | GGACCGTCAGTCTTCCTCTTCCCCC |
| | | CAAAACCCAAGGACACCCTCATGA |
| | | TCTCCCGGACCCCTGAGGTCACATG |
| | | CGTGGTGGTGGACGTGAGCCACGA |
| | | AGACCCTGAGGTCAAGTTCAACTG |
| | | GTACGTGGACGGCGTGGAGGTGCA |
| | | TAATGCCAAGACAAAGCCGCGGGA |
| | | GGAGCAGTACAACAGCACGTACCG |
| | | TGTGGTCAGCGTCCTCACCGTCCTG |
| | | CACCAGGACTGGCTGAATGGCAAG |
| | | GAGTACAAGTGCAAGGTGTCCAAC |
| | | AAAGCCCTCCCAGCCCCCATCGAG |
| | | AAAACCATCTCCAAAGCCAAAGGG |
| | | CAGCCCCGAGAACCACAGGTGTAC |
| | | ACCCTGCCCCCATCCCGGGAGGAG |
| | | ATGACCAAGAACCAGGTCAGCCTG |
| | | ACCTGCCTGGTCAAAGGCTTCTATC |
| | | CCAGCGACATCGCCGTGGAGTGGG |
| | | AGAGCAATGGGCAGCCGGAGAACA |
| | | ACTACAAGACCACGCCTCCCGTGCT |
| | | GGACTCCGACGGCTCCTTCTTCCTC |
| | | TATAGCAAGCTCACCGTGGACAAG |
| | | AGCAGGTGGCAGCAGGGGAACGTC |
| | | TTCTCATGCTCCGTGATGCATGAGG |
| | | CTCTGCACAACCACTACACGCAGA |
| | | AGAGCCTCTCCCTGTCTCCGGGCAA |
| | | ATAG |
| 1159 | Hu anti-huCCR8 LIBC318774-1 HuIgG1z | ATGGCCTGGGCTCTGCTGCTCCTCA |
| | mAb_LC | CCCTCCTCACTCAGGGCACAGGGTC |
| | | CTGGGCCTCCTATGAGCTGACTCAG |
| | | CCACTCTCAGTGTCAGTGGCCCTGG |
| | | GACAGACGGCCAGGATTACCTGTG |
| | | GGGGAAACAACATTGGAGGTAAAA |
| | | ATGTGCACTGGTACCAGCAGAAGC |
| | | CAGGCCAGGCCCCTGTGCTGGTCAT |
| | | CTATAGGGATAGCAACCGGCCCTCT |
| | | GGGATCCCTGAGCGATTCTCTGGCT |
| | | CCAAGTCGGGGAACACGGCCACCC |
| | | TGACCATCAGCAGAGCCCAAGCCG |
| | | GGGATGAGTCTGACTATTACTGTCA |
| | | GGTTTGGGACAGCAGCACTGTGGT |
| | | ATTCGGCGGAGGGACCACGCTGAC |
| | | CGTCCTAGGTCAGCCCAAGGCTGC |
| | | ACCCTCGGTCACTCTGTTCCCGCCC |
| | | TCCTCTGAGGAGCTTCAAGCCAACA |
| | | AGGCCACACTGGTGTGTCTCATCAG |
| | | TGACTTCTACCCGGGAGCCGTGACA |
| | | GTGGCCTGGAAGGCAGATAGCAGC |
| | | CCCGTCAAGGCGGGAGTGGAAACC |
| | | ACCACACCCTCCAAACAAAGCAAC |
| | | AACAAGTACGCGGCCAGCAGCTAT |
| | | CTGAGCCTGACGCCTGAGCAGTGG |
| | | AAGTCCCACAGAAGCTACAGCTGC |
| | | CAGGTCACGCATGAAGGGAGCACC |
| | | GTGGAGAAGACAGTGGCCCCTACA |
| | | GAATGTTCATAG |
| 1160 | Hu anti-huCCR8 LIBC318774-1 HuIgG1z | ATGGACATGAGGGTGCCCGCTCAG |
| | mAb_HC | CTCCTGGGGCTCCTGCTGCTGTGGC |
| | | TGAGAGGTGCGCGCTGTCAGGTGC |
| | | AGGTGGTGGAGTCTGGGGGAGGCG |
| | | TGGTCCAGCCTGGGAGGTCCCTGA |
| | | GACTCTCCTGTGCAGCCTCTGGATT |
| | | CACCCTCAGTAGTTATGGCTTTCAC |
| | | TGGGTCCGCCAGACTCCAGGCAAG |
| | | GGGCTGGAGTGGGTGGCAGTTATA |
| | | TCATATGATGGAAGTAATAAATAct |
| | | ATGCAGACTCCGTGAAGGGCCGAT |
| | | TCACCATCTCCAGAGACAATTCCAA |
| | | GAACACGCTGTATCTCCAAATGAA |
| | | CAGCCTGAGAGGTGAGGACACGGC |
| | | GGTGTATTACTGTGCGAGAGTTTAC |
| | | TATGGTTCGGGGACTTATTATAAAA |
| | | ACCGCTACTACTACGGTATGGACGT |
| | | CTGGGGCCAAGGGACCACGGTCAC |
| | | CGTCTCCTCAGCCTCCACCAAGGGC |
| | | CCATCGGTCTTCCCCCTGGCACCCT |
| | | CCTCCAAGAGCACCTCTGGGGGCA |
| | | CAGCGGCCCTGGGCTGCCTGGTCA |
| | | AGGACTACTTCCCCGAACCGGTGA |
| | | CGGTGTCGTGGAACTCAGGCGCCCT |
| | | GACCAGCGGCGTGCACACCTTCCC |
| | | GGCTGTCCTACAGTCCTCAGGACTC |
| | | TACTCCCTCAGCAGCGTGGTGACCG |
| | | TGCCCTCCAGCAGCTTGGGCACCCA |
| | | GACCTACATCTGCAACGTGAATCAC |
| | | AAGCCCAGCAACACCAAGGTGGAC |
| | | AAGAAAGTTGAGCCCAAATCTTGT |
| | | GACAAAACTCACACATGCCCACCG |
| | | TGCCCAGCACCTGAACTCCTGGGG |
| | | GGACCGTCAGTCTTCCTCTTCCCCC |
| | | CAAAACCCAAGGACACCCTCATGA |
| | | TCTCCCGGACCCCTGAGGTCACATG |
| | | CGTGGTGGTGGACGTGAGCCACGA |
| | | AGACCCTGAGGTCAAGTTCAACTG |
| | | GTACGTGGACGGCGTGGAGGTGCA |
| | | TAATGCCAAGACAAAGCCGCGGGA |
| | | GGAGCAGTACAACAGCACGTACCG |
| | | TGTGGTCAGCGTCCTCACCGTCCTG |
| | | CACCAGGACTGGCTGAATGGCAAG |
| | | GAGTACAAGTGCAAGGTGTCCAAC |
| | | AAAGCCCTCCCAGCCCCCATCGAG |
| | | AAAACCATCTCCAAAGCCAAAGGG |
| | | CAGCCCCGAGAACCACAGGTGTAC |
| | | ACCCTGCCCCCATCCCGGGAGGAG |
| | | ATGACCAAGAACCAGGTCAGCCTG |
| | | ACCTGCCTGGTCAAAGGCTTCTATC |
| | | CCAGCGACATCGCCGTGGAGTGGG |
| | | AGAGCAATGGGCAGCCGGAGAACA |
| | | ACTACAAGACCACGCCTCCCGTGCT |
| | | GGACTCCGACGGCTCCTTCTTCCTC |
| | | TATAGCAAGCTCACCGTGGACAAG |
| | | AGCAGGTGGCAGCAGGGGAACGTC |
| | | TTCTCATGCTCCGTGATGCATGAGG |
| | | CTCTGCACAACCACTACACGCAGA |
| | | AGAGCCTCTCCCTGTCTCCGGGCAA |
| | | ATAG |
| 1161 | Hu anti-huCCR8 LIBC319840-1 HuIgG1z | ATGGCCTGGGCTCTGCTGCTCCTCA |
| | mAb_LC | CCCTCCTCACTCAGGGCACAGGGTC |
| | | CTGGGCCTCCTATGAGCTGACTCAG |
| | | CCACTCTCAGTGTCAGAGGCCCTGG |
| | | GACAGACGGCCAGGATTACCTGTG |
| | | GGGGAAACAACATTGGAAGTAAAA |
| | | ATGTGCACTGGTACCAGCAGAAGC |
| | | CAGGCCAGGCCCCTGTACTGGTCAT |
| | | CTATAGGGATAGCAACCGGCCCTCT |
| | | GGGATCCCTGAGCGATTCTCTGGCT |
| | | CCAAGTCGGGGAACACGGCCACCC |
| | | TGACCATCAGCAGAGCCCAAGCCG |
| | | GGGATGAGGCTGACTATTACTGTCA |
| | | GGTGTGGGACAGCAGCACTGTGGT |
| | | TTTCGGCGGAGGGACCAAGGTGAC |
| | | CGTCCTAGGTCAGCCCAAGGCTGC |
| | | ACCCTCGGTCACTCTGTTCCCGCCC |
| | | TCCTCTGAGGAGCTTCAAGCCAACA |
| | | AGGCCACACTGGTGTGTCTCATCAG |
| | | TGACTTCTACCCGGGAGCCGTGACA |
| | | GTGGCCTGGAAGGCAGATAGCAGC |
| | | CCCGTCAAGGCGGGAGTGGAAACC |
| | | ACCACACCCTCCAAACAAAGCAAC |
| | | AACAAGTACGCGGCCAGCAGCTAT |
| | | CTGAGCCTGACGCCTGAGCAGTGG |
| | | AAGTCCCACAGAAGCTACAGCTGC |
| | | CAGGTCACGCATGAAGGGAGCACC |
| | | GTGGAGAAGACAGTGGCCCCTACA |
| | | GAATGTTCATAG |
| 1162 | Hu anti-huCCR8 LIBC319840-1 HuIgG1z | ATGGACATGAGGGTGCCCGCTCAG |
| | mAb_HC | CTCCTGGGGCTCCTGCTGCTGTGGC |
| | | TGAGAGGTGCGCGCTGTCAGGTGC |
| | | AGCTGGTGGAGTCTGGGGGAGGCG |
| | | TGGTCCAGCCTGGGAGGTCCCTGA |
| | | GACTCTCCTGTGTAGTCTCTGGATT |
| | | CAACTTCATTAACAATGGCATGCAC |
| | | TGGGTCCGCCAGGCTCCAGGCAAG |
| | | GGGCTGGACTGGGTGGCAGTTATA |
| | | TCAAATGATGGAAGTAATAAATAC |
| | | TATCCAGACTCCGTGAAGGGCCGA |
| | | TTCACCATCTCCAGAGACAATTCCA |
| | | AGAACACGCTGTATCTGCAAATGA |
| | | ACAGCCTGAGAGCTGAGGACTCGG |
| | | CTGTGTATTACTGTGCGAAAGTTTA |
| | | CTATGGTTCGGGAAATTATTATAAA |
| | | AACAACTACTACTACGGTATGGAC |
| | | GTCTGGGGCCAAGGGACCACGGTC |
| | | ACCGTCTCCTCAGCCTCCACCAAGG |
| | | GCCCATCGGTCTTCCCCCTGGCACC |
| | | CTCCTCCAAGAGCACCTCTGGGGGC |
| | | ACAGCGGCCCTGGGCTGCCTGGTC |
| | | AAGGACTACTTCCCCGAACCGGTG |
| | | ACGGTGTCGTGGAACTCAGGCGCC |
| | | CTGACCAGCGGCGTGCACACCTTCC |
| | | CGGCTGTCCTACAGTCCTCAGGACT |
| | | CTACTCCCTCAGCAGCGTGGTGACC |
| | | GTGCCCTCCAGCAGCTTGGGCACCC |
| | | AGACCTACATCTGCAACGTGAATC |
| | | ACAAGCCCAGCAACACCAAGGTGG |
| | | ACAAGAAAGTTGAGCCCAAATCTT |
| | | GTGACAAAACTCACACATGCCCAC |
| | | CGTGCCCAGCACCTGAACTCCTGGG |
| | | GGGACCGTCAGTCTTCCTCTTCCCC |
| | | CCAAAACCCAAGGACACCCTCATG |
| | | ATCTCCCGGACCCCTGAGGTCACAT |
| | | GCGTGGTGGTGGACGTGAGCCACG |
| | | AAGACCCTGAGGTCAAGTTCAACT |
| | | GGTACGTGGACGGCGTGGAGGTGC |
| | | ATAATGCCAAGACAAAGCCGCGGG |
| | | AGGAGCAGTACAACAGCACGTACC |
| | | GTGTGGTCAGCGTCCTCACCGTCCT |
| | | GCACCAGGACTGGCTGAATGGCAA |
| | | GGAGTACAAGTGCAAGGTGTCCAA |
| | | CAAAGCCCTCCCAGCCCCCATCGA |
| | | GAAAACCATCTCCAAAGCCAAAGG |
| | | GCAGCCCCGAGAACCACAGGTGTA |
| | | CACCCTGCCCCCATCCCGGGAGGA |
| | | GATGACCAAGAACCAGGTCAGCCT |
| | | GACCTGCCTGGTCAAAGGCTTCTAT |
| | | CCCAGCGACATCGCCGTGGAGTGG |
| | | GAGAGCAATGGGCAGCCGGAGAAC |
| | | AACTACAAGACCACGCCTCCCGTG |
| | | CTGGACTCCGACGGCTCCTTCTTCC |
| | | TCTATAGCAAGCTCACCGTGGACA |
| | | AGAGCAGGTGGCAGCAGGGGAACG |
| | | TCTTCTCATGCTCCGTGATGCATGA |
| | | GGCTCTGCACAACCACTACACGCA |
| | | GAAGAGCCTCTCCCTGTCTCCGGGC |
| | | AAATAG |
| 1163 | Hu anti-huCCR8 LIBC320212-1 HuIgG1z | ATGGCCTGGGCTCTGCTGCTCCTCA |
| | mAb_LC | CCCTCCTCACTCAGGGCACAGGGTC |
| | | CTGGGCCTCCTATGAGCTGACTCAG |
| | | CCACTCTCAGTGTCAGTGGCCCTGG |
| | | GACAGACGGCCAGGATTACCTGTG |
| | | AGGGAAACAACATTGGAAGTCAAA |
| | | ATGTGCACTGGTACCAGCAGAAGC |
| | | CAGGCCAGGCCCCTGTGCTGGTCAT |
| | | GTATAGGGATAGCAACCGGCCCTC |
| | | TGGGATCCCTGAACGATTCTCTGGC |
| | | TCCAAGTCGGGGAACACGGCCACC |
| | | CTGGCCATCAGCAGAGCCCAAGCC |
| | | GGGGATGAGTCTGACTATTACTGTC |
| | | AGGTGTGGGACGGCAGTGCCGTGG |
| | | TATTCGGCGGAGGGACCACGCTGA |
| | | CCGTCCTAGGTCAGCCCAAGGCTGC |
| | | ACCCTCGGTCACTCTGTTCCCGCCC |
| | | TCCTCTGAGGAGCTTCAAGCCAACA |
| | | AGGCCACACTGGTGTGTCTCATCAG |
| | | TGACTTCTACCCGGGAGCCGTGACA |
| | | GTGGCCTGGAAGGCAGATAGCAGC |
| | | CCCGTCAAGGCGGGAGTGGAAACC |
| | | ACCACACCCTCCAAACAAAGCAAC |
| | | AACAAGTACGCGGCCAGCAGCTAT |
| | | CTGAGCCTGACGCCTGAGCAGTGG |
| | | AAGTCCCACAGAAGCTACAGCTGC |
| | | CAGGTCACGCATGAAGGGAGCACC |
| | | GTGGAGAAGACAGTGGCCCCTACA |
| | | GAATGTTCATAG |
| 1164 | Hu anti-huCCR8 LIBC320212-1 HuIgG1z | ATGGACATGAGGGTGCCCGCTCAG |
| | mAb_HC | CTCCTGGGGCTCCTGCTGCTGTGGC |
| | | TGAGAGGTGCGCGCTGTCAGATGC |
| | | AGGTGGTGGAGTCTGGGGGAGGCG |
| | | TGGTCCAGCCTGGGAGGTCCCTGA |
| | | GACTCTCCTGTGCAGCCTCTGGATT |
| | | CACCTTCAGTAGCTCTGGCATGCAC |
| | | TGGGTCCGCCAGGCTCCAGGCAAG |
| | | GGCCTGGAGTGGGTGGCAGTTATA |
| | | TCACATGATGGAAGTAATAAATAC |
| | | TATGCAGACTCCGTGAAGGGCCGA |
| | | TTCACCATCTCCAGAGACAATTCCA |
| | | AGAACACGCTGTATCTGCAAATGA |
| | | ATAGCCTGGGAGGTGAGGACACGG |
| | | CGGTGTATTACTGTGCGAAAGTTTA |
| | | CTATGGTTCGGGGATTTATTATAAA |
| | | AACCGCTATTACTACGGTATGGACG |
| | | TCTGGGGCCAAGGGACCACGGTCA |
| | | TCGTCTCGTCAGCCTCCACCAAGGG |
| | | CCCATCGGTCTTCCCCCTGGCACCC |
| | | TCCTCCAAGAGCACCTCTGGGGGC |
| | | ACAGCGGCCCTGGGCTGCCTGGTC |
| | | AAGGACTACTTCCCCGAACCGGTG |
| | | ACGGTGTCGTGGAACTCAGGCGCC |
| | | CTGACCAGCGGCGTGCACACCTTCC |
| | | CGGCTGTCCTACAGTCCTCAGGACT |
| | | CTACTCCCTCAGCAGCGTGGTGACC |
| | | GTGCCCTCCAGCAGCTTGGGCACCC |
| | | AGACCTACATCTGCAACGTGAATC |
| | | ACAAGCCCAGCAACACCAAGGTGG |
| | | ACAAGAAAGTTGAGCCCAAATCTT |
| | | GTGACAAAACTCACACATGCCCAC |
| | | CGTGCCCAGCACCTGAACTCCTGGG |
| | | GGGACCGTCAGTCTTCCTCTTCCCC |
| | | CCAAAACCCAAGGACACCCTCATG |
| | | ATCTCCCGGACCCCTGAGGTCACAT |
| | | GCGTGGTGGTGGACGTGAGCCACG |
| | | AAGACCCTGAGGTCAAGTTCAACT |
| | | GGTACGTGGACGGCGTGGAGGTGC |
| | | ATAATGCCAAGACAAAGCCGCGGG |
| | | AGGAGCAGTACAACAGCACGTACC |
| | | GTGTGGTCAGCGTCCTCACCGTCCT |
| | | GCACCAGGACTGGCTGAATGGCAA |
| | | GGAGTACAAGTGCAAGGTGTCCAA |
| | | CAAAGCCCTCCCAGCCCCCATCGA |
| | | GAAAACCATCTCCAAAGCCAAAGG |
| | | GCAGCCCCGAGAACCACAGGTGTA |
| | | CACCCTGCCCCCATCCCGGGAGGA |
| | | GATGACCAAGAACCAGGTCAGCCT |
| | | GACCTGCCTGGTCAAAGGCTTCTAT |
| | | CCCAGCGACATCGCCGTGGAGTGG |
| | | GAGAGCAATGGGCAGCCGGAGAAC |
| | | AACTACAAGACCACGCCTCCCGTG |
| | | CTGGACTCCGACGGCTCCTTCTTCC |
| | | TCTATAGCAAGCTCACCGTGGACA |
| | | AGAGCAGGTGGCAGCAGGGGAACG |
| | | TCTTCTCATGCTCCGTGATGCATGA |
| | | GGCTCTGCACAACCACTACACGCA |
| | | GAAGAGCCTCTCCCTGTCTCCGGGC |
| | | AAATAG |
| 1165 | Hu anti-huCCR8 LIBC320384-1 HuIgG1z | ATGGCCTGGGCTCTGCTGCTCCTCA |
| | mAb_LC | CCCTCCTCACTCAGGGCACAGGGTC |
| | | CTGGGCCTCCTATGAGCTGACTCAG |
| | | CCACTCTCAGTGTCAGTGGCCCTGG |
| | | GACAGACGGCCAGGATTACCTGTG |
| | | GGGGACACAACATTGGAAGTAAAG |
| | | GTGTGCACTGGTACCAGCAGAAGC |
| | | CAGGCCAGGCCCCTGTGCTGGTCAT |
| | | CTATAGAAATAGCAACCGGCCCTCT |
| | | GGGATCCCTGAGCGATTCTCTGGCT |
| | | CCAACTCGGGGAACACGGCCACCC |
| | | TGACCATCAGCAGAGCCCAAGCCG |
| | | GGGATGAGGCTGACTATTACTGTCA |
| | | GGTGTGGGACAGCAGCACTGTGGT |
| | | TTTCGGCGGAGGGACCGAGCTGAC |
| | | CGTCCTAGGTCAGCCCAAGGCTGC |
| | | ACCCTCGGTCACTCTGTTCCCGCCC |
| | | TCCTCTGAGGAGCTTCAAGCCAACA |
| | | AGGCCACACTGGTGTGTCTCATCAG |
| | | TGACTTCTACCCGGGAGCCGTGACA |
| | | GTGGCCTGGAAGGCAGATAGCAGC |
| | | CCCGTCAAGGCGGGAGTGGAAACC |
| | | ACCACACCCTCCAAACAAAGCAAC |
| | | AACAAGTACGCGGCCAGCAGCTAT |
| | | CTGAGCCTGACGCCTGAGCAGTGG |
| | | AAGTCCCACAGAAGCTACAGCTGC |
| | | CAGGTCACGCATGAAGGGAGCACC |
| | | GTGGAGAAGACAGTGGCCCCTACA |
| | | GAATGTTCATAG |
| 1166 | Hu anti-huCCR8 LIBC320384-1 HuIgG1z | ATGGACATGAGGGTGCCCGCTCAG |
| | mAb_HC | CTCCTGGGGCTCCTGCTGCTGTGGC |
| | | TGAGAGGTGCGCGCTGTCAGGTGC |
| | | AGctGGTGGAGtctGGGGGAGGCGTG |
| | | GCCCAGCCTGGGAGGTCCCTGAGA |
| | | CTCTCCTGTGCAGCCTCTGGATTCA |
| | | ACTTCAGTGattGTGGCATGCACTGG |
| | | GTCCGCCaggCTCCAGGCAAGGGGC |
| | | TGGAGTGGGTGGCAGTTATATCATA |
| | | TGATGGAGGTAATAAATATTATGC |
| | | GGACTCCGTGAAGGGCCGGTTCAC |
| | | CATCTCCAGAGacgATTCCAAGAAC |
| | | ACACTGTAtcTGCAAacggacAGCCTG |
| | | AGAACTGAGGACACGGCTGTGTAT |
| | | TACTGTGCGAAAGTTTACTATGGTT |
| | | CGGGTATTTATTATAAAAACAGGTA |
| | | CTACTACGGGATGGACGTctggggCC |
| | | AAGGGACCACGGTcaccgTCTCCTCA |
| | | GCCTCCACCAAGGGCCCATCGGTCT |
| | | TCCCCCTGGCACCCTCCTCCAAGAG |
| | | CACCTCTGGGGGCACAGCGGCCCT |
| | | GGGCTGCCTGGTCAAGGACTACTTC |
| | | CCCGAACCGGTGACGGTGTCGTGG |
| | | AACTCAGGCGCCCTGACCAGCGGC |
| | | GTGCACACCTTCCCGGCTGTCCTAC |
| | | AGTCCTCAGGACTCTACTCCCTCAG |
| | | CAGCGTGGTGACCGTGCCCTCCAGC |
| | | AGCTTGGGCACCCAGACCTACATCT |
| | | GCAACGTGAATCACAAGCCCAGCA |
| | | ACACCAAGGTGGACAAGAAAGTTG |
| | | AGCCCAAATCTTGTGACAAAACTC |
| | | ACACATGCCCACCGTGCCCAGCAC |
| | | CTGAACTCCTGGGGGGACCGTCAG |
| | | TCTTCCTCTTCCCCCCAAAACCCAA |
| | | GGACACCCTCATGATCTCCCGGACC |
| | | CCTGAGGTCACATGCGTGGTGGTG |
| | | GACGTGAGCCACGAAGACCCTGAG |
| | | GTCAAGTTCAACTGGTACGTGGAC |
| | | GGCGTGGAGGTGCATAATGCCAAG |
| | | ACAAAGCCGCGGGAGGAGCAGTAC |
| | | AACAGCACGTACCGTGTGGTCAGC |
| | | GTCCTCACCGTCCTGCACCAGGACT |
| | | GGCTGAATGGCAAGGAGTACAAGT |
| | | GCAAGGTGTCCAACAAAGCCCTCC |
| | | CAGCCCCCATCGAGAAAACCATCT |
| | | CCAAAGCCAAAGGGCAGCCCCGAG |
| | | AACCACAGGTGTACACCCTGCCCCC |
| | | ATCCCGGGAGGAGATGACCAAGAA |
| | | CCAGGTCAGCCTGACCTGCCTGGTC |
| | | AAAGGCTTCTATCCCAGCGACATCG |
| | | CCGTGGAGTGGGAGAGCAATGGGC |
| | | AGCCGGAGAACAACTACAAGACCA |
| | | CGCCTCCCGTGCTGGACTCCGACGG |
| | | CTCCTTCTTCCTCTATAGCAAGCTC |
| | | ACCGTGGACAAGAGCAGGTGGCAG |
| | | CAGGGGAACGTCTTCTCATGCTCCG |
| | | TGATGCATGAGGCTCTGCACAACC |
| | | ACTACACGCAGAAGAGCCTCTCCCT |
| | | GTCTCCGGGCAAATAG |
| 1167 | Hu anti-huCCR8 LIBC320689-1 HuIgG1z | ATGGCCTGGGCTCTGCTGCTCCTCA |
| | mAb_LC | CCCTCCTCACTCAGGGCACAGGGTC |
| | | CTGGGCCTCCTATGAGCTGACTCAG |
| | | CCACTCTCAGTGTCAGTGGCCCTGG |
| | | GACAGACGGGCAGGATTACCTGTG |
| | | GGGGAAACAACATTGGAAGTAAAA |
| | | ATGTGCACTGGTACCAGCAGAAGC |
| | | CAGGCCAGGCCCCTGTGCTGGTCAT |
| | | CTATAGGAGTAGCAACCGGCCCTCT |
| | | GGGATCCCTGAGCGATTCTCTGGCT |
| | | CCAACTCGGGGAACACGGCCACCC |
| | | TGACCATCAGCAGAGCCCAAGCCG |
| | | GGGATGAGTCTGACTATTACTGTCA |
| | | AATATGGGACAGCAGCACTGTGGT |
| | | ATTCGGCGGAGGGACCAAGCTGAC |
| | | CGTCCTAGGTCAGCCCAAGGCTGC |
| | | ACCCTCGGTCACTCTGTTCCCGCCC |
| | | TCCTCTGAGGAGCTTCAAGCCAACA |
| | | AGGCCACACTGGTGTGTCTCATCAG |
| | | TGACTTCTACCCGGGAGCCGTGACA |
| | | GTGGCCTGGAAGGCAGATAGCAGC |
| | | CCCGTCAAGGCGGGAGTGGAAACC |
| | | ACCACACCCTCCAAACAAAGCAAC |
| | | AACAAGTACGCGGCCAGCAGCTAT |
| | | CTGAGCCTGACGCCTGAGCAGTGG |
| | | AAGTCCCACAGAAGCTACAGCTGC |
| | | CAGGTCACGCATGAAGGGAGCACC |
| | | GTGGAGAAGACAGTGGCCCCTACA |
| | | GAATGTTCATAG |
| 1168 | Hu anti-huCCR8 LIBC320689-1 HuIgG1z | ATGGACATGAGGGTGCCCGCTCAG |
| | mAb_HC | CTCCTGGGGCTCCTGCTGCTGTGGC |
| | | TGAGAGGTGCGCGCTGTCAGGTGC |
| | | AGGTGGTGGAGTCTGGGGGAGGCG |
| | | TGGTCCAGCCTGGGAGGTCCCTGA |
| | | GACTCTCCTGTGCAGCCTCTGGATT |
| | | CACCTTCAGTAGCTATGGCATGCAC |
| | | TGGGTCCGCCAGGCTCCAGGCAAG |
| | | GGGCTGGAGTGGGTGGCAGTTATA |
| | | TCATTTGATGGAAATAATAAATACT |
| | | ATGCAGACTCCGTGAAGGGCCGAT |
| | | TCACCATCTCCAGAGACAATTCCAA |
| | | GAACACGCTATATCTGCAAATGAA |
| | | CAGCCTGAGAGGTGAGGACACGGC |
| | | GGTGTATTACTGTGCGAGAGTTTAT |
| | | TATGGTTCGGGGAGTTATTATAAAA |
| | | ACCGCTACTACTACGGTATGGACGT |
| | | CTGGGGCCAAGGGACCACGGTCAC |
| | | CGTCTCCACAGCCTCCACCAAGGGC |
| | | CCATCGGTCTTCCCCCTGGCACCCT |
| | | CCTCCAAGAGCACCTCTGGGGGCA |
| | | CAGCGGCCCTGGGCTGCCTGGTCA |
| | | AGGACTACTTCCCCGAACCGGTGA |
| | | CGGTGTCGTGGAACTCAGGCGCCCT |
| | | GACCAGCGGCGTGCACACCTTCCC |
| | | GGCTGTCCTACAGTCCTCAGGACTC |
| | | TACTCCCTCAGCAGCGTGGTGACCG |
| | | TGCCCTCCAGCAGCTTGGGCACCCA |
| | | GACCTACATCTGCAACGTGAATCAC |
| | | AAGCCCAGCAACACCAAGGTGGAC |
| | | AAGAAAGTTGAGCCCAAATCTTGT |
| | | GACAAAACTCACACATGCCCACCG |
| | | TGCCCAGCACCTGAACTCCTGGGG |
| | | GGACCGTCAGTCTTCCTCTTCCCCC |
| | | CAAAACCCAAGGACACCCTCATGA |
| | | TCTCCCGGACCCCTGAGGTCACATG |
| | | CGTGGTGGTGGACGTGAGCCACGA |
| | | AGACCCTGAGGTCAAGTTCAACTG |
| | | GTACGTGGACGGCGTGGAGGTGCA |
| | | TAATGCCAAGACAAAGCCGCGGGA |
| | | GGAGCAGTACAACAGCACGTACCG |
| | | TGTGGTCAGCGTCCTCACCGTCCTG |
| | | CACCAGGACTGGCTGAATGGCAAG |
| | | GAGTACAAGTGCAAGGTGTCCAAC |
| | | AAAGCCCTCCCAGCCCCCATCGAG |
| | | AAAACCATCTCCAAAGCCAAAGGG |
| | | CAGCCCCGAGAACCACAGGTGTAC |
| | | ACCCTGCCCCCATCCCGGGAGGAG |
| | | ATGACCAAGAACCAGGTCAGCCTG |
| | | ACCTGCCTGGTCAAAGGCTTCTATC |
| | | CCAGCGACATCGCCGTGGAGTGGG |
| | | AGAGCAATGGGCAGCCGGAGAACA |
| | | ACTACAAGACCACGCCTCCCGTGCT |
| | | GGACTCCGACGGCTCCTTCTTCCTC |
| | | TATAGCAAGCTCACCGTGGACAAG |
| | | AGCAGGTGGCAGCAGGGGAACGTC |
| | | TTCTCATGCTCCGTGATGCATGAGG |
| | | CTCTGCACAACCACTACACGCAGA |
| | | AGAGCCTCTCCCTGTCTCCGGGCAA |
| | | ATAG |
| 1169 | Hu anti-huCCR8 LIBC321408-1 HuIgG1z | ATGGCCTGGGCTCTGCTGCTCCTCA |
| | mAb_LC | CCCTCCTCACTCAGGGCACAGGGTC |
| | | CTGGGCCTCCTATGAACTGACTCAG |
| | | CCACTCTCAGTGTCAGTGGCCCTGG |
| | | GACAGACGGCCAGGATTACCTGTG |
| | | GGGGAAACAACATTGGAAGTAAAA |
| | | ATGTACACTGGTACCAGCAGAGGC |
| | | CAGGCCAGGCCCCTGTGTTGGTCAT |
| | | CTACAGGGATAGCAACCGGCCCTC |
| | | TGGGATCCCTGAGCGATTATCTGGC |
| | | TCCAAAGCGGGGAACACGGCCACC |
| | | CTGACCATCAGCAGAGCCCACGCC |
| | | GGGGATGAGGCTGACTATTACTGTC |
| | | AGGTGTGGGACAGCAGCACTGTGG |
| | | TTTTCGGCGGAGGGACCGAGCTGA |
| | | CCGTCCAAGGTCAGCCCAAGGCTG |
| | | CACCCTCGGTCACTCTGTTCCCGCC |
| | | CTCCTCTGAGGAGCTTCAAGCCAAC |
| | | AAGGCCACACTGGTGTGTCTCATCA |
| | | GTGACTTCTACCCGGGAGCCGTGAC |
| | | AGTGGCCTGGAAGGCAGATAGCAG |
| | | CCCCGTCAAGGCGGGAGTGGAAAC |
| | | CACCACACCCTCCAAACAAAGCAA |
| | | CAACAAGTACGCGGCCAGCAGCTA |
| | | TCTGAGCCTGACGCCTGAGCAGTG |
| | | GAAGTCCCACAGAAGCTACAGCTG |
| | | CCAGGTCACGCATGAAGGGAGCAC |
| | | CGTGGAGAAGACAGTGGCCCCTAC |
| | | AGAATGTTCATAG |
| 1170 | Hu anti-huCCR8 LIBC321408-1 HuIgG1z | ATGGACATGAGGGTGCCCGCTCAG |
| | mAb_HC | CTCCTGGGGCTCCTGCTGCTGTGGC |
| | | TGAGAGGTGCGCGCTGTCAGGTGC |
| | | AATTGGTGGAGTCTGGGGGAGGCG |
| | | TGGTCCAGCCTGGGAGGTCTCTGAG |
| | | ACTCTCCTGTGCAGTCTCTGGATTC |
| | | ACGTTCAGTAGCAATGGCATGCACT |
| | | GGGTCCGCCAGGCTCCAGGCAAGG |
| | | GGCTGGAGTGGGTGGCAGTTATAT |
| | | CAAATGATGGAAGTAATAAATATT |
| | | ATGGAGACTCCGTGAAGGGCCGAT |
| | | TCACCATCTCCAGAGACAATTCCAA |
| | | GAACACGCTGTATCTGCAAATGAA |
| | | CAGCCTGAGAGCTGAGGACACGGC |
| | | TGTGTATTACTGTGCGAAAGTTTAC |
| | | TATGGTTCGGGAATTTATTACAGAA |
| | | ACAACTACTACTACGGTATGGACGT |
| | | CTGGGGCCAAGGGACCACGGTCAC |
| | | CGTCTCCTCAGCCTCCACCAAGGGC |
| | | CCATCGGTCTTCCCCCTGGCACCCT |
| | | CCTCCAAGAGCACCTCTGGGGGCA |
| | | CAGCGGCCCTGGGCTGCCTGGTCA |
| | | AGGACTACTTCCCCGAACCGGTGA |
| | | CGGTGTCGTGGAACTCAGGCGCCCT |
| | | GACCAGCGGCGTGCACACCTTCCC |
| | | GGCTGTCCTACAGTCCTCAGGACTC |
| | | TACTCCCTCAGCAGCGTGGTGACCG |
| | | TGCCCTCCAGCAGCTTGGGCACCCA |
| | | GACCTACATCTGCAACGTGAATCAC |
| | | AAGCCCAGCAACACCAAGGTGGAC |
| | | AAGAAAGTTGAGCCCAAATCTTGT |
| | | GACAAAACTCACACATGCCCACCG |
| | | TGCCCAGCACCTGAACTCCTGGGG |
| | | GGACCGTCAGTCTTCCTCTTCCCCC |
| | | CAAAACCCAAGGACACCCTCATGA |
| | | TCTCCCGGACCCCTGAGGTCACATG |
| | | CGTGGTGGTGGACGTGAGCCACGA |
| | | AGACCCTGAGGTCAAGTTCAACTG |
| | | GTACGTGGACGGCGTGGAGGTGCA |
| | | TAATGCCAAGACAAAGCCGCGGGA |
| | | GGAGCAGTACAACAGCACGTACCG |
| | | TGTGGTCAGCGTCCTCACCGTCCTG |
| | | CACCAGGACTGGCTGAATGGCAAG |
| | | GAGTACAAGTGCAAGGTGTCCAAC |
| | | AAAGCCCTCCCAGCCCCCATCGAG |
| | | AAAACCATCTCCAAAGCCAAAGGG |
| | | CAGCCCCGAGAACCACAGGTGTAC |
| | | ACCCTGCCCCCATCCCGGGAGGAG |
| | | ATGACCAAGAACCAGGTCAGCCTG |
| | | ACCTGCCTGGTCAAAGGCTTCTATC |
| | | CCAGCGACATCGCCGTGGAGTGGG |
| | | AGAGCAATGGGCAGCCGGAGAACA |
| | | ACTACAAGACCACGCCTCCCGTGCT |
| | | GGACTCCGACGGCTCCTTCTTCCTC |
| | | TATAGCAAGCTCACCGTGGACAAG |
| | | AGCAGGTGGCAGCAGGGGAACGTC |
| | | TTCTCATGCTCCGTGATGCATGAGG |
| | | CTCTGCACAACCACTACACGCAGA |
| | | AGAGCCTCTCCCTGTCTCCGGGCAA |
| | | ATAG |
| 1171 | Hu anti-huCCR8 LIBC321824-1 HuIgG1z | ATGGCCTGGGCTCTGCTGCTCCTCA |
| | mAb_LC | CCCTCCTCACTCAGGGCACAGGGTC |
| | | CTGGGCCTCCTATGAGCTGACTCAG |
| | | CCACTCTCAGTGTCAGTGGCCCTGG |
| | | GACAGACGGCCAGGATTACCTGTG |
| | | GGGGAAACAACATTGGAAGTAAAA |
| | | ATGTGCACTGGTACCAGCAGAAGC |
| | | CAGGCCAGGCCCCTATACTGGTCAT |
| | | CTATAGGAATACCAACCGGCCCTCT |
| | | GGGATCCCTGAGCGATTCTCTGGCT |
| | | CCAACTCGGGGAACACGGCCACCC |
| | | TGACCATCAGCAGAGCCCAAGTCG |
| | | GGGATGAGTCTGACTATTTCTGTCA |
| | | GGTGTGGGACAGCAGCACTGTGGT |
| | | ATTCGGCGGAGGGACCAAGCTGAC |
| | | CGTCCTAGGTCAGCCCAAGGCTGC |
| | | ACCCTCGGTCACTCTGTTCCCGCCC |
| | | TCCTCTGAGGAGCTTCAAGCCAACA |
| | | AGGCCACACTGGTGTGTCTCATCAG |
| | | TGACTTCTACCCGGGAGCCGTGACA |
| | | GTGGCCTGGAAGGCAGATAGCAGC |
| | | CCCGTCAAGGCGGGAGTGGAAACC |
| | | ACCACACCCTCCAAACAAAGCAAC |
| | | AACAAGTACGCGGCCAGCAGCTAT |
| | | CTGAGCCTGACGCCTGAGCAGTGG |
| | | AAGTCCCACAGAAGCTACAGCTGC |
| | | CAGGTCACGCATGAAGGGAGCACC |
| | | GTGGAGAAGACAGTGGCCCCTACA |
| | | GAATGTTCATAG |
| 1172 | Hu anti-huCCR8 LIBC321824-1 HuIgG1z | ATGGACATGAGGGTGCCCGCTCAG |
| | mAb_HC | CTCCTGGGGCTCCTGCTGCTGTGGC |
| | | TGAGAGGTGCGCGCTGTCAGGTGC |
| | | AGGTGGTGGAGtctGGGGGAGGCGT |
| | | GGTCCAGccTGGGAGGTCcCTGAGA |
| | | CTCTCCTGTGGAGCCTCTGGATTCA |
| | | CcttCAGtggcTATGGCATgcACTGGGT |
| | | CcgcCAggcTCCAGGCAAGGGGCTGG |
| | | AGTGGGTGGCAGTTATATCATATGA |
| | | TGGAAGTAATAAATACTATGCAGA |
| | | CTCCGTgAAGGGCCGATTCCCCATC |
| | | TCAAGAgaCAATTCCAAGAACACGC |
| | | TGTATCTGCAAATGAACAGcCTGAG |
| | | AGGTGAGGACACGGCGGTGTATTA |
| | | CTGTgcGAGAGTTTATTATGGTTCGG |
| | | GGATTTATTATAAAAACCGCTacTaC |
| | | TACGGTAtgGACGtctGGGGCCAAGG |
| | | GACCACGGTcgcCGTCTCCTCAGCCT |
| | | CCACCAAGGGCCCATCGGTCTTCCC |
| | | CCTGGCACCCTCCTCCAAGAGCACC |
| | | TCTGGGGGCACAGCGGCCCTGGGC |
| | | TGCCTGGTCAAGGACTACTTCCCCG |
| | | AACCGGTGACGGTGTCGTGGAACT |
| | | CAGGCGCCCTGACCAGCGGCGTGC |
| | | ACACCTTCCCGGCTGTCCTACAGTC |
| | | CTCAGGACTCTACTCCCTCAGCAGC |
| | | GTGGTGACCGTGCCCTCCAGCAGCT |
| | | TGGGCACCCAGACCTACATCTGCA |
| | | ACGTGAATCACAAGCCCAGCAACA |
| | | CCAAGGTGGACAAGAAAGTTGAGC |
| | | CCAAATCTTGTGACAAAACTCACAC |
| | | ATGCCCACCGTGCCCAGCACCTGA |
| | | ACTCCTGGGGGGACCGTCAGTCTTC |
| | | CTCTTCCCCCCAAAACCCAAGGACA |
| | | CCCTCATGATCTCCCGGACCCCTGA |
| | | GGTCACATGCGTGGTGGTGGACGT |
| | | GAGCCACGAAGACCCTGAGGTCAA |
| | | GTTCAACTGGTACGTGGACGGCGT |
| | | GGAGGTGCATAATGCCAAGACAAA |
| | | GCCGCGGGAGGAGCAGTACAACAG |
| | | CACGTACCGTGTGGTCAGCGTCCTC |
| | | ACCGTCCTGCACCAGGACTGGCTG |
| | | AATGGCAAGGAGTACAAGTGCAAG |
| | | GTGTCCAACAAAGCCCTCCCAGCCC |
| | | CCATCGAGAAAACCATCTCCAAAG |
| | | CCAAAGGGCAGCCCCGAGAACCAC |
| | | AGGTGTACACCCTGCCCCCATCCCG |
| | | GGAGGAGATGACCAAGAACCAGGT |
| | | CAGCCTGACCTGCCTGGTCAAAGG |
| | | CTTCTATCCCAGCGACATCGCCGTG |
| | | GAGTGGGAGAGCAATGGGCAGCCG |
| | | GAGAACAACTACAAGACCACGCCT |
| | | CCCGTGCTGGACTCCGACGGCTCCT |
| | | TCTTCCTCTATAGCAAGCTCACCGT |
| | | GGACAAGAGCAGGTGGCAGCAGGG |
| | | GAACGTCTTCTCATGCTCCGTGATG |
| | | CATGAGGCTCTGCACAACCACTAC |
| | | ACGCAGAAGAGCCTCTCCCTGTCTC |
| | | CGGGCAAATAG |
| 1173 | Hu anti-huCCR8 LIBC321845-1 HuIgG1z | ATGGCCTGGGCTCTGCTGCTCCTCA |
| | mAb_LC | CCCTCCTCACTCAGGGCACAGGGTC |
| | | CTGGGCCTCCTATGAGCTGACTCAG |
| | | CCACTCTCAGTGTCAGTGGCCCTGG |
| | | GACAGACGGCCAGGATTACCTGTG |
| | | GGGGAAACAACATTGGAAGTAAAA |
| | | ATGTGCACTGGTACCAGCAGAAGC |
| | | CAGGCCAGGCCCCTATACTGGTCAT |
| | | CTATAGGAATACCAACCGGCCCTCT |
| | | GGGATCCCTGAGCGATTCTCTGGCT |
| | | CCAACTCGGGGAACACGGCCACCC |
| | | TGACCATCAGCAGAGCCCAAGTCG |
| | | GGGATGAGTCTGACTATTTCTGTCA |
| | | GGTGTGGGACAGCAGCACTGTGGT |
| | | ATTCGGCGGAGGGACCAAGCTGAC |
| | | CGTCCTAGGTCAGCCCAAGGCTGC |
| | | ACCCTCGGTCACTCTGTTCCCGCCC |
| | | TCCTCTGAGGAGCTTCAAGCCAACA |
| | | AGGCCACACTGGTGTGTCTCATCAG |
| | | TGACTTCTACCCGGGAGCCGTGACA |
| | | GTGGCCTGGAAGGCAGATAGCAGC |
| | | CCCGTCAAGGCGGGAGTGGAAACC |
| | | ACCACACCCTCCAAACAAAGCAAC |
| | | AACAAGTACGCGGCCAGCAGCTAT |
| | | CTGAGCCTGACGCCTGAGCAGTGG |
| | | AAGTCCCACAGAAGCTACAGCTGC |
| | | CAGGTCACGCATGAAGGGAGCACC |
| | | GTGGAGAAGACAGTGGCCCCTACA |
| | | GAATGTTCATAG |
| 1174 | Hu anti-huCCR8 LIBC321845-1 HuIgG1z | ATGGACATGAGGGTGCCCGCTCAG |
| | mAb_HC | CTCCTGGGGCTCCTGCTGCTGTGGC |
| | | TGAGAGGTGCGCGCTGTCAGGTGC |
| | | AGGTGGTGGAGTCTGGGGGAGGCG |
| | | TGGTCCAGCCTGGGAGGTCCCTGA |
| | | GACTCTCCTGTGGAGCCTCTGGATT |
| | | CACCTTCAGTGGCTATGGCATGCAC |
| | | TGGGTCCGCCAGGCTCCAGGCAAG |
| | | GGGCTGGAGTGGGTGGCAGTTATA |
| | | TCATATGATGGAAGTAATAAATACT |
| | | ATGCAGACTCCGTGAAGGGCCGAT |
| | | TCACCATCTCAAGAGACAATTCCAA |
| | | GAACACGCTGTATCTGCAAATGAA |
| | | CAGCCTGAGAGGTGAGGACACGGC |
| | | GGTGTATTACTGTGCGAGAGTTTAT |
| | | TATGGTTCGGGGATTTATTATAAAA |
| | | ACCGCTACTACTACGGTATGGACGT |
| | | CTGGGGCCAAGGGACCACGGTCGC |
| | | CGTCTCCTCAGCCTCCACCAAGGGC |
| | | CCATCGGTCTTCCCCCTGGCACCCT |
| | | CCTCCAAGAGCACCTCTGGGGGCA |
| | | CAGCGGCCCTGGGCTGCCTGGTCA |
| | | AGGACTACTTCCCCGAACCGGTGA |
| | | CGGTGTCGTGGAACTCAGGCGCCCT |
| | | GACCAGCGGCGTGCACACCTTCCC |
| | | GGCTGTCCTACAGTCCTCAGGACTC |
| | | TACTCCCTCAGCAGCGTGGTGACCG |
| | | TGCCCTCCAGCAGCTTGGGCACCCA |
| | | GACCTACATCTGCAACGTGAATCAC |
| | | AAGCCCAGCAACACCAAGGTGGAC |
| | | AAGAAAGTTGAGCCCAAATCTTGT |
| | | GACAAAACTCACACATGCCCACCG |
| | | TGCCCAGCACCTGAACTCCTGGGG |
| | | GGACCGTCAGTCTTCCTCTTCCCCC |
| | | CAAAACCCAAGGACACCCTCATGA |
| | | TCTCCCGGACCCCTGAGGTCACATG |
| | | CGTGGTGGTGGACGTGAGCCACGA |
| | | AGACCCTGAGGTCAAGTTCAACTG |
| | | GTACGTGGACGGCGTGGAGGTGCA |
| | | TAATGCCAAGACAAAGCCGCGGGA |
| | | GGAGCAGTACAACAGCACGTACCG |
| | | TGTGGTCAGCGTCCTCACCGTCCTG |
| | | CACCAGGACTGGCTGAATGGCAAG |
| | | GAGTACAAGTGCAAGGTGTCCAAC |
| | | AAAGCCCTCCCAGCCCCCATCGAG |
| | | AAAACCATCTCCAAAGCCAAAGGG |
| | | CAGCCCCGAGAACCACAGGTGTAC |
| | | ACCCTGCCCCCATCCCGGGAGGAG |
| | | ATGACCAAGAACCAGGTCAGCCTG |
| | | ACCTGCCTGGTCAAAGGCTTCTATC |
| | | CCAGCGACATCGCCGTGGAGTGGG |
| | | AGAGCAATGGGCAGCCGGAGAACA |
| | | ACTACAAGACCACGCCTCCCGTGCT |
| | | GGACTCCGACGGCTCCTTCTTCCTC |
| | | TATAGCAAGCTCACCGTGGACAAG |
| | | AGCAGGTGGCAGCAGGGGAACGTC |
| | | TTCTCATGCTCCGTGATGCATGAGG |
| | | CTCTGCACAACCACTACACGCAGA |
| | | AGAGCCTCTCCCTGTCTCCGGGCAA |
| | | ATAG |
| 1175 | Hu anti-huCCR8 LIBC322176-1 HuIgG1z | ATGGCCTGGGCTCTGCTGCTCCTCA |
| | mAb_LC | CCCTCCTCACTCAGGGCACAGGGTC |
| | | CTGGGCCTCCTATGACCTGACTCAG |
| | | CCACTCTCAGTGTCAGTGGCCCTGG |
| | | GACAGACGGCCAGGATTACCTGTG |
| | | GGGGAAACAACATTGGAGATAAAA |
| | | ATGTGCACTGGTACCAGCAGAAGC |
| | | CAGGCCAGGCCCCTGTGCTGGTCAT |
| | | CTATAGGAATAACGTCCGGCCCTCT |
| | | GGGATCCCTGAGCGATTCTCTGGCT |
| | | CCAACTCGGGGAACACGGCCACCC |
| | | TGACCATCAGCAGAGCCCAAGCCG |
| | | GGGATGAGGCTGACTATTACTGTCA |
| | | GGTGTGGGACAGCAGCACTGTGGT |
| | | TTTCGGCGGAGGGACCAAGCTGAC |
| | | CGTCCTAGGTCAGCCCAAGGCTGC |
| | | ACCCTCGGTCACTCTGTTCCCGCCC |
| | | TCCTCTGAGGAGCTTCAAGCCAACA |
| | | AGGCCACACTGGTGTGTCTCATCAG |
| | | TGACTTCTACCCGGGAGCCGTGACA |
| | | GTGGCCTGGAAGGCAGATAGCAGC |
| | | CCCGTCAAGGCGGGAGTGGAAACC |
| | | ACCACACCCTCCAAACAAAGCAAC |
| | | AACAAGTACGCGGCCAGCAGCTAT |
| | | CTGAGCCTGACGCCTGAGCAGTGG |
| | | AAGTCCCACAGAAGCTACAGCTGC |
| | | CAGGTCACGCATGAAGGGAGCACC |
| | | GTGGAGAAGACAGTGGCCCCTACA |
| | | GAATGTTCATAG |
| 1176 | Hu anti-huCCR8 LIBC322176-1 HuIgG1z | ATGGACATGAGGGTGCCCGCTCAG |
| | mAb_HC | CTCCTGGGGCTCCTGCTGCTGTGGC |
| | | TGAGAGGTGCGCGCTGTCAGGTGC |
| | | AGCTGGTGGAATCTGGGGGAGGCG |
| | | TGGTCCAGCCTGGGAGGTCCCTGA |
| | | GACTCTCCTGTGCAGCCTCTGGGCT |
| | | CAACTTCAGTAACTTTGGCATGCAC |
| | | TGGGTCCGCCAGGCTCCAGGCAAG |
| | | GGGCTGGACTGGGTGGCAGTTATA |
| | | TCATATGATGGAGGTAATAAATACT |
| | | ATGCAGACTCCGTGAAGGGCCGAT |
| | | TCACCGTCTCCAGAGACAATTCCAA |
| | | GAACACGCTCTTTCTGCAAATGAAC |
| | | AGCCTGAGAGCTGAGGACACGGCT |
| | | CTGTATTACTGTGCGAAAGTTTACT |
| | | ATGGCTCGGGCAGTTATTATAAAA |
| | | AGAGGTACTACTACGGTATGGACG |
| | | TCTGGGGCCAGGGGACCACGGTCA |
| | | CCGTCTCCTCAGCCTCCACCAAGGG |
| | | CCCATCGGTCTTCCCCCTGGCACCC |
| | | TCCTCCAAGAGCACCTCTGGGGGC |
| | | ACAGCGGCCCTGGGCTGCCTGGTC |
| | | AAGGACTACTTCCCCGAACCGGTG |
| | | ACGGTGTCGTGGAACTCAGGCGCC |
| | | CTGACCAGCGGCGTGCACACCTTCC |
| | | CGGCTGTCCTACAGTCCTCAGGACT |
| | | CTACTCCCTCAGCAGCGTGGTGACC |
| | | GTGCCCTCCAGCAGCTTGGGCACCC |
| | | AGACCTACATCTGCAACGTGAATC |
| | | ACAAGCCCAGCAACACCAAGGTGG |
| | | ACAAGAAAGTTGAGCCCAAATCTT |
| | | GTGACAAAACTCACACATGCCCAC |
| | | CGTGCCCAGCACCTGAACTCCTGGG |
| | | GGGACCGTCAGTCTTCCTCTTCCCC |
| | | CCAAAACCCAAGGACACCCTCATG |
| | | ATCTCCCGGACCCCTGAGGTCACAT |
| | | GCGTGGTGGTGGACGTGAGCCACG |
| | | AAGACCCTGAGGTCAAGTTCAACT |
| | | GGTACGTGGACGGCGTGGAGGTGC |
| | | ATAATGCCAAGACAAAGCCGCGGG |
| | | AGGAGCAGTACAACAGCACGTACC |
| | | GTGTGGTCAGCGTCCTCACCGTCCT |
| | | GCACCAGGACTGGCTGAATGGCAA |
| | | GGAGTACAAGTGCAAGGTGTCCAA |
| | | CAAAGCCCTCCCAGCCCCCATCGA |
| | | GAAAACCATCTCCAAAGCCAAAGG |
| | | GCAGCCCCGAGAACCACAGGTGTA |
| | | CACCCTGCCCCCATCCCGGGAGGA |
| | | GATGACCAAGAACCAGGTCAGCCT |
| | | GACCTGCCTGGTCAAAGGCTTCTAT |
| | | CCCAGCGACATCGCCGTGGAGTGG |
| | | GAGAGCAATGGGCAGCCGGAGAAC |
| | | AACTACAAGACCACGCCTCCCGTG |
| | | CTGGACTCCGACGGCTCCTTCTTCC |
| | | TCTATAGCAAGCTCACCGTGGACA |
| | | AGAGCAGGTGGCAGCAGGGGAACG |
| | | TCTTCTCATGCTCCGTGATGCATGA |
| | | GGCTCTGCACAACCACTACACGCA |
| | | GAAGAGCCTCTCCCTGTCTCCGGGC |
| | | AAATAG |
| 1177 | Hu anti-huCCR8 LIBC323412-1 HuIgG1z | ATGGCCTGGGCTCTGCTGCTCCTCA |
| | mAb_LC | CCCTCCTCACTCAGGGCACAGGGTC |
| | | CTGGGCCTCCTATGAGCTGACTCAG |
| | | CCACTCTCAGTGTCAGTGGCCCTGG |
| | | GACAGACGGCCAGGATTACCTGTG |
| | | GGGGAAACAACATTGGAAGTAAAA |
| | | ATGTGCACTGGTACCAGCAGAAGC |
| | | CAGGCCAGGCCCCTGTGCTGGTCAT |
| | | CTATAGGGATAGCAACCGGCCCTCT |
| | | GGGATCCCTGAGCGATTCTCTGGCT |
| | | CCAAGTCGGGGAACACGGCCACCC |
| | | TGACCATCAGCAGAGCCCAAGCCG |
| | | GGGATGAGGCTGACTATTACTGTCA |
| | | GGTGTGGGACAGCAGCACTGTGGT |
| | | TTTCGGCGGAGGGGCCAAGCTGAC |
| | | CGTCCTAGGTCAGCCCAAGGCTGC |
| | | ACCCTCGGTCACTCTGTTCCCGCCC |
| | | TCCTCTGAGGAGCTTCAAGCCAACA |
| | | AGGCCACACTGGTGTGTCTCATCAG |
| | | TGACTTCTACCCGGGAGCCGTGACA |
| | | GTGGCCTGGAAGGCAGATAGCAGC |
| | | CCCGTCAAGGCGGGAGTGGAAACC |
| | | ACCACACCCTCCAAACAAAGCAAC |
| | | AACAAGTACGCGGCCAGCAGCTAT |
| | | CTGAGCCTGACGCCTGAGCAGTGG |
| | | AAGTCCCACAGAAGCTACAGCTGC |
| | | CAGGTCACGCATGAAGGGAGCACC |
| | | GTGGAGAAGACAGTGGCCCCTACA |
| | | GAATGTTCATAG |
| 1178 | Hu anti-huCCR8 LIBC323412-1 HuIgG1z | ATGGACATGAGGGTGCCCGCTCAG |
| | mAb_HC | CTCCTGGGGCTCCTGCTGCTGTGGC |
| | | TGAGAGGTGCGCGCTGTCAGGTGC |
| | | AGCTGGTGGAGTCTGGGGGAGGCG |
| | | TGGTCCAGCCTGGGAGGTCCCTGA |
| | | GACTCTCCTGTGCAGCCTCTGGATT |
| | | CAACTTCAGTAGCTGTGGCATGCAC |
| | | TGGGTCCGCCAGGCTCCAGGCAAG |
| | | GGGCTGGAGTGGGTGGCAGTTATA |
| | | TCATATGATGGAACTAATAAATACT |
| | | ATGCGGACTCCGTGAAGGGCCGAT |
| | | TCACCATCTCCAGAGACAATTCCAA |
| | | GAACACGCTGTATCTGCAAATGAA |
| | | CAGCCTGAGAGCTGAGGACACGGC |
| | | TGTGTATTACTGTGCGAAAGTTTAC |
| | | TATGGTTCGGGTATTTATTATAAAA |
| | | AGAACTACTACTACGGTATGGACG |
| | | TCTGGGGCCAAGGGACCACGGTCA |
| | | CCGTCTCCTCAGCCTCCACCAAGGG |
| | | CCCATCGGTCTTCCCCCTGGCACCC |
| | | TCCTCCAAGAGCACCTCTGGGGGC |
| | | ACAGCGGCCCTGGGCTGCCTGGTC |
| | | AAGGACTACTTCCCCGAACCGGTG |
| | | ACGGTGTCGTGGAACTCAGGCGCC |
| | | CTGACCAGCGGCGTGCACACCTTCC |
| | | CGGCTGTCCTACAGTCCTCAGGACT |
| | | CTACTCCCTCAGCAGCGTGGTGACC |
| | | GTGCCCTCCAGCAGCTTGGGCACCC |
| | | AGACCTACATCTGCAACGTGAATC |
| | | ACAAGCCCAGCAACACCAAGGTGG |
| | | ACAAGAAAGTTGAGCCCAAATCTT |
| | | GTGACAAAACTCACACATGCCCAC |
| | | CGTGCCCAGCACCTGAACTCCTGGG |
| | | GGGACCGTCAGTCTTCCTCTTCCCC |
| | | CCAAAACCCAAGGACACCCTCATG |
| | | ATCTCCCGGACCCCTGAGGTCACAT |
| | | GCGTGGTGGTGGACGTGAGCCACG |
| | | AAGACCCTGAGGTCAAGTTCAACT |
| | | GGTACGTGGACGGCGTGGAGGTGC |
| | | ATAATGCCAAGACAAAGCCGCGGG |
| | | AGGAGCAGTACAACAGCACGTACC |
| | | GTGTGGTCAGCGTCCTCACCGTCCT |
| | | GCACCAGGACTGGCTGAATGGCAA |
| | | GGAGTACAAGTGCAAGGTGTCCAA |
| | | CAAAGCCCTCCCAGCCCCCATCGA |
| | | GAAAACCATCTCCAAAGCCAAAGG |
| | | GCAGCCCCGAGAACCACAGGTGTA |
| | | CACCCTGCCCCCATCCCGGGAGGA |
| | | GATGACCAAGAACCAGGTCAGCCT |
| | | GACCTGCCTGGTCAAAGGCTTCTAT |
| | | CCCAGCGACATCGCCGTGGAGTGG |
| | | GAGAGCAATGGGCAGCCGGAGAAC |
| | | AACTACAAGACCACGCCTCCCGTG |
| | | CTGGACTCCGACGGCTCCTTCTTCC |
| | | TCTATAGCAAGCTCACCGTGGACA |
| | | AGAGCAGGTGGCAGCAGGGGAACG |
| | | TCTTCTCATGCTCCGTGATGCATGA |
| | | GGCTCTGCACAACCACTACACGCA |
| | | GAAGAGCCTCTCCCTGTCTCCGGGC |
| | | AAATAG |
| 1179 | huCCR8_32360_huIgG1z mAb_HC | ATGGACATGAGGGTGCCCGCTCAG |
| | | CTCCTGGGGCTCCTGCTGCTGTGGC |
| | | TGAGAGGTGCGCGCTGTGAGGTGC |
| | | AGCTGGTGGAGTCTGGGGGAGGCT |
| | | TGGTAAAGCCTGGGGGGTCCCTGA |
| | | GACTCTCCTGTGCAGCCTCTGGATT |
| | | TACTTTCAGTAACGCCCGGATGGGC |
| | | TGGGTCCGCCAGGCTCCAGGGAAG |
| | | GGGCTGGAGTGGGTTGGCCGTATT |
| | | AAAAGCAAAACTGAAGGTGGGACA |
| | | AGAGACTACGCTGCACCCGTGAAA |
| | | GGCAGATTCACCATCTCAAGAGAT |
| | | GATTCAAAAAACACGCTGTATCTGC |
| | | AAATGAACAGCCTGAAAACCGAGG |
| | | ACACAGCCGTGTATTATTGTACCTC |
| | | GTATAGTGGGGTCTGGGGCCAAGG |
| | | GACAATGGTCACCGTCTCTTCAGCC |
| | | TCCACCAAGGGCCCATCGGTCTTCC |
| | | CCCTGGCACCCTCCTCCAAGAGCAC |
| | | CTCTGGGGGCACAGCGGCCCTGGG |
| | | CTGCCTGGTCAAGGACTACTTCCCC |
| | | GAACCGGTGACGGTGTCGTGGAAC |
| | | TCAGGCGCCCTGACCAGCGGCGTG |
| | | CACACCTTCCCGGCTGTCCTACAGT |
| | | CCTCAGGACTCTACTCCCTCAGCAG |
| | | CGTGGTGACCGTGCCCTCCAGCAGC |
| | | TTGGGCACCCAGACCTACATCTGCA |
| | | ACGTGAATCACAAGCCCAGCAACA |
| | | CCAAGGTGGACAAGAAAGTTGAGC |
| | | CCAAATCTTGTGACAAAACTCACAC |
| | | ATGCCCACCGTGCCCAGCACCTGA |
| | | ACTCCTGGGGGGACCGTCAGTCTTC |
| | | CTCTTCCCCCCAAAACCCAAGGACA |
| | | CCCTCATGATCTCCCGGACCCCTGA |
| | | GGTCACATGCGTGGTGGTGGACGT |
| | | GAGCCACGAAGACCCTGAGGTCAA |
| | | GTTCAACTGGTACGTGGACGGCGT |
| | | GGAGGTGCATAATGCCAAGACAAA |
| | | GCCGCGGGAGGAGCAGTACAACAG |
| | | CACGTACCGTGTGGTCAGCGTCCTC |
| | | ACCGTCCTGCACCAGGACTGGCTG |
| | | AATGGCAAGGAGTACAAGTGCAAG |
| | | GTGTCCAACAAAGCCCTCCCAGCCC |
| | | CCATCGAGAAAACCATCTCCAAAG |
| | | CCAAAGGGCAGCCCCGAGAACCAC |
| | | AGGTGTACACCCTGCCCCCATCCCG |
| | | GGAGGAGATGACCAAGAACCAGGT |
| | | CAGCCTGACCTGCCTGGTCAAAGG |
| | | CTTCTATCCCAGCGACATCGCCGTG |
| | | GAGTGGGAGAGCAATGGGCAGCCG |
| | | GAGAACAACTACAAGACCACGCCT |
| | | CCCGTGCTGGACTCCGACGGCTCCT |
| | | TCTTCCTCTATAGCAAGCTCACCGT |
| | | GGACAAGAGCAGGTGGCAGCAGGG |
| | | GAACGTCTTCTCATGCTCCGTGATG |
| | | CATGAGGCTCTGCACAACCACTAC |
| | | ACGCAGAAGAGCCTCTCCCTGTCTC |
| | | CGGGCAAATAG |
| 1180 | huCCR8_32360_huIgG1z mAb_LC | ATGGACATGAGGGTGCCCGCTCAG |
| | | CTCCTGGGGCTCCTGCTGCTGTGGC |
| | | TGAGAGGTGCGCGCTGTGACATCG |
| | | TGATGACCCAGTCTCCAGACTCCCT |
| | | GGCTGTGTCTCTGGGCGAGAGGGC |
| | | CACCATCAACTGCAAGTCCAGCCA |
| | | GAGTGTTTTATACAGTTCCAACAAT |
| | | AAGAACTACTTAGCTTGGTACCATC |
| | | AGAAACCAGGACAGTCTCCTAAGC |
| | | TGCTCATTTCCTGGGCATCTACCCG |
| | | GGAATCCGGGGTCCCTGACCGATTC |
| | | AGTGGCAGCGGGTCTGGGACAGAT |
| | | TTCACTCTCACCATCAACAGCCTGC |
| | | AGGCTGAAGATGTGGCAGTTTATTA |
| | | CTGTCAACAATATTATAGTATTCCG |
| | | ATCACTTTCGGCGGAGGGACCAAG |
| | | GTGGAGATCAAACGAACGGTGGCT |
| | | GCACCATCTGTCTTCATCTTCCCGC |
| | | CATCTGATGAGCAGTTGAAATCTGG |
| | | AACTGCCTCTGTTGTGTGCCTGCTG |
| | | AATAACTTCTATCCCAGAGAGGCC |
| | | AAAGTACAGTGGAAGGTGGATAAC |
| | | GCCCTCCAATCGGGTAACTCCCAGG |
| | | AGAGTGTCACAGAGCAGGACAGCA |
| | | AGGACAGCACCTACAGCCTCAGCA |
| | | GCACCCTGACGCTGAGCAAAGCAG |
| | | ACTACGAGAAACACAAAGTCTACG |
| | | CCTGCGAAGTCACCCATCAGGGCCT |
| | | GAGCTCGCCCGTCACAAAGAGCTT |
| | | CAACAGGGGAGAGTGTTAG |
| 1181 | HCDR1 Consensus | X₁X₂GX₄H |
| | | X₁ = N, S, D, G, T, or R, X₂ = C, N, Y, S, |
| | | or F, X₄ = M or F |
| 1182 | LCDR2 Consensus | RX₂X₃X₄RPS |
| | | X₂ = A, N, D, S, or Q, X₃ = S, T, N, I, F, |
| | | or A, and X₄ = N or V |

1. A T cell engager (TCE) molecule comprising (i) an scFab that binds to a tumor antigen, wherein the scFab comprises a first heavy chain variable region (scFab VH), a CHI domain, a first light chain variable region (scFab VL), and a Cκ or Cλ domain, and (ii) an scFv that binds CD3, comprising a second VL and a second VH, and wherein the TCE molecule is a single chain.

2. The TCE molecule of claim 1, wherein the scFab comprises a C-terminus portion that is connected by a linker to an N-terminal portion of the scFv.

3. The TCE molecule of claim 1, wherein the TCE molecule further comprises an scFc.

4. The TCE molecule of claim 1, wherein the TCE molecule further comprises an scFc which comprises an N-terminus portion that is connected by a linker to a C-terminal portion of the scFv.

5. The TCE molecule of claim 1, wherein the scFv binds human CD3.

6. The TCE molecule of claim 1, wherein the scFab has an orientation in the following order, from N-terminus to C-terminus, VH, CH1, VL, and either Cκ or Cλ.

7. The TCE molecule of claim 1, wherein the scFab has an orientation in the following order, from N-terminus to C-terminus, VL, either Cκ or Cλ, VH, and CH1.

8. The TCE molecule of claim 1, wherein the scFab comprises a linker that connects the CH1 and scFab VL, wherein the linker is (G4S)6, (G4S)7, (G4S)8, (G4Q)6, (G4Q)7, or (G4Q)8.

9. The TCE molecule of claim 1, wherein the TCE molecule comprises a linker that connects the scFab Cκ or Cλ and the scFab VH, wherein the linker is (G4S)6, (G4S)7, (G4S)8, (G4Q)6, (G4Q)7, or (G4Q)8.

10. The TCE molecule of claim 1, wherein CH1, Cκ and/or Cλ domains are IgG, IgM, IgA, IgD, or IgE.

11. The TCE molecule of claim 1, wherein the CH1, Cκ and/or Cλ domains are IgG.

12. The TCE molecule of claim 1, wherein the CH1, Cκ and/or Cλ domains are IgG1.

13. The TCE molecule of claim 1, wherein the scFab contains a cysteine clamp between CHI and either Cκ or Cλ.

14. The TCE molecule of claim 1, comprising an orientation from N-terminus to C-terminus of: VH-CH1-Linker-VL-Cκ or Cλ-Linker-VH-Linker-VL-Linker-Fc1 (CH2-CH3)-Linker-Fc2 (CH2-CH3).

15. The TCE molecule of claim 1, comprising an orientation from N-terminus to C-terminus of: VL-CHI-Linker-VH-Ck or Cλ-Linker-VH-Linker-VL-Linker-Fc1 (CH2-CH3)-Linker-Fc2 (CH2-CH3).

16. (canceled)

17. The TCE molecule of claim 1, wherein the scFv that binds CD3 is I2E.

18. The TCE molecule of claim 1, wherein the scFv that binds CD3 is I2C.

19-37. (canceled)

38. A method of treating cancer in a patient comprising administering an effective amount of the TCE molecule of claim 1 to the patient.

39. The method of claim 38, wherein the cancer is a solid tumor.

40. The method of claim 38, wherein the cancer is non-small cell lung cancer, gastric cancer, head and neck squamous cell carcinoma, hepatocellular carcinoma, triple-negative breast cancer, colorectal cancer, pancreatic cancer, or metastatic castrate-resistant prostate cancer.

41. The method of claim 38, wherein the method further comprises administering to the patient a PD-1 antagonist antibody or PD-L1 antagonist antibody.

42. The method of claim 38, wherein the method further comprises administering to the patient a PD-1 antagonist antibody or PD-L1 antagonist antibody which is administered prior to, concurrently with, and/or after administration of the TCE molecule.

43. The method of claim 38, wherein the method further comprises administering to the patient pembrolizumab, nivolumab, cemiplimab, or antibody 20C1.009.

44. The method of claim 38, wherein the method further comprises administering to the patient atezolizumab, avelumab, or durvalumab.

45-57. (canceled)

58. A pharmaceutical composition comprising the TCE molecule of claim 1 and one or more pharmaceutically acceptable carriers, diluents, or excipients.

59-112. (canceled)

The application's sequence listing, which the Patent Office published only in electronic form, follows.

SEQUENCE LISTING (1182 sequences)

SEQ ID NO: 1 - skipped

SEQ ID NO: 2 - protein, 17 aa, Artificial Sequence
  Synthetic Polypeptide
VISYDGSSQYYTDSVKG

SEQ ID NO: 3 - protein, 11 aa, Artificial Sequence
  Synthetic Polypeptide
GRLATAILFDY

SEQ ID NO: 4 - protein, 16 aa, Artificial Sequence
  Synthetic Polypeptide
KSSQSLLYSDGKTYLF

SEQ ID NO: 5 - protein, 7 aa, Artificial Sequence
  Synthetic Polypeptide
EVSNRFS

SEQ ID NO: 6 - protein, 9 aa, Artificial Sequence
  Synthetic Polypeptide
MQSIKLPLT

SEQ ID NO: 7 - protein, 120 aa, Artificial Sequence
  Synthetic Polypeptide
QVQLVESGGGVVQPGRSLRLSCEASGFTFSSYVMHWVRQAPGKCLEWVSVISYDGSSQYYTDSVKGRFTISRDNSKNTLNLQMNSLRAEDTAVYYCVRGRLATAILFDYWGQGTLVTVSS

SEQ ID NO: 8 - protein, 112 aa, Artificial Sequence
  Synthetic Polypeptide
EILMTQTPLSLSVTPGQPASISCKSSQSLLYSDGKTYLFWYLQRPGQPPQLLIYEVSNRFSGVPDRFSGSGSGTDFTLKISRVEAEDVGIYYCMQSIKLPLTFGCGTKVEIK

SEQ ID NO: 9 - protein, 247 aa, Artificial Sequence
  Synthetic Polypeptide
QVQLVESGGGVVQPGRSLRLSCEASGFTFSSYVMHWVRQAPGKCLEWVSVISYDGSSQYYTDSVKGRFTISRDNSKNTLNLQMNSLRAEDTAVYYCVRGRLATAILFDYWGQGTLVTVSSGGGGQGGGGQGGGGQEILMTQTPLSLSVTPGQPASISCKSSQSLLYSDGKTYLFWYLQRPGQPPQLLIYEVSNRFSGVPDRFSGSGSGTDFTLKISRVEAEDVGIYYCMQSIKLPLTFGCGTKVEIK

SEQ ID NO: 10 - protein, 502 aa, Artificial Sequence
  Synthetic Polypeptide
QVQLVESGGGVVQPGRSLRLSCEASGFTFSSYVMHWVRQAPGKCLEWVSVISYDGSSQYYTDSVKGRFTISRDNSKNTLNLQMNSLRAEDTAVYYCVRGRLATAILFDYWGQGTLVTVSSGGGGQGGGGQGGGGQEILMTQTPLSLSVTPGQPASISCKSSQSLLYSDGKTYLFWYLQRPGQPPQLLIYEVSNRFSGVPDRFSGSGSGTDFTLKISRVEAEDVGIYYCMQSIKLPLTFGCGTKVEIKSGGGGQEVQLVESGGGLVQPGGSLKLSCAASGFTFNKYAINWVRQAPGKGLEWVARIRSKYNNYATYYADAVKDRFTISRDDSKNTVYLQMNNLKTEDTAVYYCARAGNFGSSYISYWAYWGQGTLVTVSSGGGGQGGGGQGGGGQQTVVTQEPSLTVSPGGTVTITCGSSTGAVTSGNYPNWVQKKPGQAPRGLIGGTKFLAPGTPARFSGSLSGGKAALTLSGVQPEDEAEYYCVLWYSNRWVFGSGTKLTVL

SEQ ID NO: 11 - protein, 980 aa, Artificial Sequence
  Synthetic Polypeptide
QVQLVESGGGVVQPGRSLRLSCEASGFTFSSYVMHWVRQAPGKCLEWVSVISYDGSSQYYTDSVKGRFTISRDNSKNTLNLQMNSLRAEDTAVYYCVRGRLATAILFDYWGQGTLVTVSSGGGGQGGGGQGGGGQEILMTQTPLSLSVTPGQPASISCKSSQSLLYSDGKTYLFWYLQRPGQPPQLLIYEVSNRFSGVPDRFSGSGSGTDFTLKISRVEAEDVGIYYCMQSIKLPLTFGCGTKVEIKSGGGGQEVQLVESGGGLVQPGGSLKLSCAASGFTFNKYAINWVRQAPGKGLEWVARIRSKYNNYATYYADAVKDRFTISRDDSKNTVYLQMNNLKTEDTAVYYCARAGNFGSSYISYWAYWGQGTLVTVSSGGGGQGGGGQGGGGQQTVVTQEPSLTVSPGGTVTITCGSSTGAVTSGNYPNWVQKKPGQAPRGLIGGTKFLAPGTPARFSGSLSGGKAALTLSGVQPEDEAEYYCVLWYSNRWVFGSGTKLTVLGGGGCPPCPAPELLGGPSVFLFPPKPKDTLMISRTPEVTCVVVDVSHEEPEVKFNWYVDGVEVHNAKTKPCEEQYGSTYRCVSVLTVLHQDWLNGKEYKCKVSNKALPAPIEKTISKAKGQPREPQVYTLPPSREEMTKNQVSLTCLVKGFYPSDIAVEWESNGQPENNYKTTPPVLDSDGSFFLYSKLTVDKSRWQQGNVFSCSVMHEALHNHYTQKSLSLSPGKGGGGQGGGGQGGGGQGGGGQGGGGQGGGGQCPPCPAPELLGGPSVFLFPPKPKDTLMISRTPEVTCVVVDVSHEEPEVKFNWYVDGVEVHNAKTKPCEEQYGSTYRCVSVLTVLHQDWLNGKEYKCKVSNKALPAPIEKTISKAKGQPREPQVYTLPPSREEMTKNQVSLTCLVKGFYPSDIAVEWESNGQPENNYKTTPPVLDSDGSFFLYSKLTVDKSRWQQGNVFSCSVMHEALHNHYTQKSLSLSPGK

SEQ ID NO: 12 - protein, 223 aa, Artificial Sequence
  Synthetic Polypeptide
QVQLVESGGGVVQPGRSLRLSCEASGFTFSSYVMHWVRQAPGKGLEWVSVISYDGSSQYYTDSVKGRFTISRDNSKNTLNLQMNSLRAEDTAVYYCVRGRLATAILFDYWGQGTLVTVSSASTKGPSVFPLAPSSKSTSGGTAALGCLVKDYFPEPVTVSWNSGALTSGVHTFPAVLQSSGLYSLSSVVTVPSSSLGTQTYICNVNHKPSNTKVDKKVEPKSC

SEQ ID NO: 13 - protein, 219 aa, Artificial Sequence
  Synthetic Polypeptide
EILMTQTPLSLSVTPGQPASISCKSSQSLLYSDGKTYLFWYLQRPGQPPQLLIYEVSNRFSGVPDRFSGSGSGTDFTLKISRVEAEDVGIYYCMQSIKLPLTFGGGTKVEIKRTVAAPSVFIFPPSDEQLKSGTASVVCLLNNFYPREAKVQWKVDNALQSGNSQESVTEQDSKDSTYSLSSTLTLSKADYEKHKVYACEVTHQGLSSPVTKSFNRGEC

SEQ ID NO: 14 - protein, 482 aa, Artificial Sequence
  Synthetic Polypeptide
QVQLVESGGGVVQPGRSLRLSCEASGFTFSSYVMHWVRQAPGKGLEWVSVISYDGSSQYYTDSVKGRFTISRDNSKNTLNLQMNSLRAEDTAVYYCVRGRLATAILFDYWGQGTLVTVSSASTKGPSVFPLAPSSKSTSGGTAALGCLVKDYFPEPVTVSWNSGALTSGVHTFPAVLQSSGLYSLSSVVTVPSSSLGTQTYICNVNHKPSNTKVDKKVEPKSCGGGGQGGGGQGGGGQGGGGQGGGGQGGGGQGGGGQGGGGQEILMTQTPLSLSVTPGQPASISCKSSQSLLYSDGKTYLFWYLQRPGQPPQLLIYEVSNRFSGVPDRFSGSGSGTDFTLKISRVEAEDVGIYYCMQSIKLPLTFGGGTKVEIKRTVAAPSVFIFPPSDEQLKSGTASVVCLLNNFYPREAKVQWKVDNALQSGNSQESVTEQDSKDSTYSLSSTLTLSKADYEKHKVYACEVTHQGLSSPVTKSFNRGEC

SEQ ID NO: 15 - protein, 737 aa, Artificial Sequence
  Synthetic Polypeptide
QVQLVESGGGVVQPGRSLRLSCEASGFTFSSYVMHWVRQAPGKGLEWVSVISYDGSSQYYTDSVKGRFTISRDNSKNTLNLQMNSLRAEDTAVYYCVRGRLATAILFDYWGQGTLVTVSSASTKGPSVFPLAPSSKSTSGGTAALGCLVKDYFPEPVTVSWNSGALTSGVHTFPAVLQSSGLYSLSSVVTVPSSSLGTQTYICNVNHKPSNTKVDKKVEPKSCGGGGQGGGGQGGGGQGGGGQGGGGQGGGGQGGGGQGGGGQEILMTQTPLSLSVTPGQPASISCKSSQSLLYSDGKTYLFWYLQRPGQPPQLLIYEVSNRFSGVPDRFSGSGSGTDFTLKISRVEAEDVGIYYCMQSIKLPLTFGGGTKVEIKRTVAAPSVFIFPPSDEQLKSGTASVVCLLNNFYPREAKVQWKVDNALQSGNSQESVTEQDSKDSTYSLSSTLTLSKADYEKHKVYACEVTHQGLSSPVTKSFNRGECSGGGGQEVQLVESGGGLVQPGGSLKLSCAASGFTFNKYAINWVRQAPGKGLEWVARIRSKYNNYATYYADAVKDRFTISRDDSKNTVYLQMNNLKTEDTAVYYCARAGNFGSSYISYWAYWGQGTLVTVSSGGGGQGGGGQGGGGQQTVVTQEPSLTVSPGGTVTITCGSSTGAVTSGNYPNWVQKKPGQAPRGLIGGTKFLAPGTPARFSGSLSGGKAALTLSGVQPEDEAEYYCVLWYSNRWVFGSGTKLTVL

SEQ ID NO: 16 - protein, 1215 aa, Artificial Sequence
  Synthetic Polypeptide
QVQLVESGGGVVQPGRSLRLSCEASGFTFSSYVMHWVRQAPGKGLEWVSVISYDGSSQYYTDSVKGRFTISRDNSKNTLNLQMNSLRAEDTAVYYCVRGRLATAILFDYWGQGTLVTVSSASTKGPSVFPLAPSSKSTSGGTAALGCLVKDYFPEPVTVSWNSGALTSGVHTFPAVLQSSGLYSLSSVVTVPSSSLGTQTYICNVNHKPSNTKVDKKVEPKSCGGGGQGGGGQGGGGQGGGGQGGGGQGGGGQGGGGQGGGGQEILMTQTPLSLSVTPGQPASISCKSSQSLLYSDGKTYLFWYLQRPGQPPQLLIYEVSNRFSGVPDRFSGSGSGTDFTLKISRVEAEDVGIYYCMQSIKLPLTFGGGTKVEIKRTVAAPSVFIFPPSDEQLKSGTASVVCLLNNFYPREAKVQWKVDNALQSGNSQESVTEQDSKDSTYSLSSTLTLSKADYEKHKVYACEVTHQGLSSPVTKSFNRGECSGGGGQEVQLVESGGGLVQPGGSLKLSCAASGFTFNKYAINWVRQAPGKGLEWVARIRSKYNNYATYYADAVKDRFTISRDDSKNTVYLQMNNLKTEDTAVYYCARAGNFGSSYISYWAYWGQGTLVTVSSGGGGQGGGGQGGGGQQTVVTQEPSLTVSPGGTVTITCGSSTGAVTSGNYPNWVQKKPGQAPRGLIGGTKFLAPGTPARFSGSLSGGKAALTLSGVQPEDEAEYYCVLWYSNRWVFGSGTKLTVLGGGGCPPCPAPELLGGPSVFLFPPKPKDTLMISRTPEVTCVVVDVSHEEPEVKFNWYVDGVEVHNAKTKPCEEQYGSTYRCVSVLTVLHQDWLNGKEYKCKVSNKALPAPIEKTISKAKGQPREPQVYTLPPSREEMTKNQVSLTCLVKGFYPSDIAVEWESNGQPENNYKTTPPVLDSDGSFFLYSKLTVDKSRWQQGNVFSCSVMHEALHNHYTQKSLSLSPGKGGGGQGGGGQGGGGQGGGGQGGGGQGGGGQCPPCPAPELLGGPSVFLFPPKPKDTLMISRTPEVTCVVVDVSHEEPEVKFNWYVDGVEVHNAKTKPCEEQYGSTYRCVSVLTVLHQDWLNGKEYKCKVSNKALPAPIEKTISKAKGQPREPQVYTLPPSREEMTKNQVSLTCLVKGFYPSDIAVEWESNGQPENNYKTTPPVLDSDGSFFLYSKLTVDKSRWQQGNVFSCSVMHEALHNHYTQKSLSLSPGK

SEQ ID NO: 17 - protein, 5 aa, Artificial Sequence
  Synthetic Polypeptide
SYGMH

SEQ ID NO: 18 - protein, 17 aa, Artificial Sequence
  Synthetic Polypeptide
VISYDGSNKYYADSVKG

SEQ ID NO: 19 - protein, 11 aa, Artificial Sequence
  Synthetic Polypeptide
GRYFDWFLFDY

SEQ ID NO: 20 - protein, 16 aa, Artificial Sequence
  Synthetic Polypeptide
KSSQSLLHSDGKTYLF

SEQ ID NO: 21 - protein, 7 aa, Artificial Sequence
  Synthetic Polypeptide
EVSNRFS

SEQ ID NO: 22 - protein, 9 aa, Artificial Sequence
  Synthetic Polypeptide
MQSLRLPLT

SEQ ID NO: 23 - protein, 120 aa, Artificial Sequence
  Synthetic Polypeptide
QVQLVESGGGVVQPGRSLRLSCAASGFTFSSYGMHWVRQAPGKCLEWVAVISYDGSNKYYADSVKGRFTISRDNSKNTLYLQMNSLRAEDTAVYYCARGRYFDWFLFDYWGQGTLVTVSS

SEQ ID NO: 24 - protein, 112 aa, Artificial Sequence
  Synthetic Polypeptide
DTVMTQTPLSLSVTPGQPASISCKSSQSLLHSDGKTYLFWYLQKPGQPPQLLISEVSNRFSGVPDRFSGSGSGTDFTLKISRVEAEDVGFYYCMQSLRLPLTFGCGTKVEIK

SEQ ID NO: 25 - protein, 247 aa, Artificial Sequence
  Synthetic Polypeptide
QVQLVESGGGVVQPGRSLRLSCAASGFTFSSYGMHWVRQAPGKCLEWVAVISYDGSNKYYADSVKGRFTISRDNSKNTLYLQMNSLRAEDTAVYYCARGRYFDWFLFDYWGQGTLVTVSSGGGGQGGGGQGGGGQDTVMTQTPLSLSVTPGQPASISCKSSQSLLHSDGKTYLFWYLQKPGQPPQLLISEVSNRFSGVPDRFSGSGSGTDFTLKISRVEAEDVGFYYCMQSLRLPLTFGCGTKVEIK

SEQ ID NO: 26 - protein, 502 aa, Artificial Sequence
  Synthetic Polypeptide
QVQLVESGGGVVQPGRSLRLSCAASGFTFSSYGMHWVRQAPGKCLEWVAVISYDGSNKYYADSVKGRFTISRDNSKNTLYLQMNSLRAEDTAVYYCARGRYFDWFLFDYWGQGTLVTVSSGGGGQGGGGQGGGGQDTVMTQTPLSLSVTPGQPASISCKSSQSLLHSDGKTYLFWYLQKPGQPPQLLISEVSNRFSGVPDRFSGSGSGTDFTLKISRVEAEDVGFYYCMQSLRLPLTFGCGTKVEIKSGGGGQEVQLVESGGGLVQPGGSLKLSCAASGFTFNKYAINWVRQAPGKGLEWVARIRSKYNNYATYYADAVKDRFTISRDDSKNTVYLQMNNLKTEDTAVYYCARAGNFGSSYISYWAYWGQGTLVTVSSGGGGQGGGGQGGGGQQTVVTQEPSLTVSPGGTVTITCGSSTGAVTSGNYPNWVQKKPGQAPRGLIGGTKFLAPGTPARFSGSLSGGKAALTLSGVQPEDEAEYYCVLWYSNRWVFGSGTKLTVL

SEQ ID NO: 27 - protein, 980 aa, Artificial Sequence
  Synthetic Polypeptide
QVQLVESGGGVVQPGRSLRLSCAASGFTFSSYGMHWVRQAPGKCLEWVAVISYDGSNKYYADSVKGRFTISRDNSKNTLYLQMNSLRAEDTAVYYCARGRYFDWFLFDYWGQGTLVTVSSGGGGQGGGGQGGGGQDTVMTQTPLSLSVTPGQPASISCKSSQSLLHSDGKTYLFWYLQKPGQPPQLLISEVSNRFSGVPDRFSGSGSGTDFTLKISRVEAEDVGFYYCMQSLRLPLTFGCGTKVEIKSGGGGQEVQLVESGGGLVQPGGSLKLSCAASGFTFNKYAINWVRQAPGKGLEWVARIRSKYNNYATYYADAVKDRFTISRDDSKNTVYLQMNNLKTEDTAVYYCARAGNFGSSYISYWAYWGQGTLVTVSSGGGGQGGGGQGGGGQQTVVTQEPSLTVSPGGTVTITCGSSTGAVTSGNYPNWVQKKPGQAPRGLIGGTKFLAPGTPARFSGSLSGGKAALTLSGVQPEDEAEYYCVLWYSNRWVFGSGTKLTVLGGGGCPPCPAPELLGGPSVFLFPPKPKDTLMISRTPEVTCVVVDVSHEEPEVKFNWYVDGVEVHNAKTKPCEEQYGSTYRCVSVLTVLHQDWLNGKEYKCKVSNKALPAPIEKTISKAKGQPREPQVYTLPPSREEMTKNQVSLTCLVKGFYPSDIAVEWESNGQPENNYKTTPPVLDSDGSFFLYSKLTVDKSRWQQGNVFSCSVMHEALHNHYTQKSLSLSPGKGGGGQGGGGQGGGGQGGGGQGGGGQGGGGQCPPCPAPELLGGPSVFLFPPKPKDTLMISRTPEVTCVVVDVSHEEPEVKFNWYVDGVEVHNAKTKPCEEQYGSTYRCVSVLTVLHQDWLNGKEYKCKVSNKALPAPIEKTISKAKGQPREPQVYTLPPSREEMTKNQVSLTCLVKGFYPSDIAVEWESNGQPENNYKTTPPVLDSDGSFFLYSKLTVDKSRWQQGNVFSCSVMHEALHNHYTQKSLSLSPGK

SEQ ID NO: 28 - protein, 223 aa, Artificial Sequence
  Synthetic Polypeptide
QVQLVESGGGVVQPGRSLRLSCAASGFTFSSYGMHWVRQAPGKGLEWVAVISYDGSNKYYADSVKGRFTISRDNSKNTLYLQMNSLRAEDTAVYYCARGRYFDWFLFDYWGQGTLVTVSSASTKGPSVFPLAPSSKSTSGGTAALGCLVKDYFPEPVTVSWNSGALTSGVHTFPAVLQSSGLYSLSSVVTVPSSSLGTQTYICNVNHKPSNTKVDKKVEPKSC

SEQ ID NO: 29 - protein, 219 aa, Artificial Sequence
  Synthetic Polypeptide
DTVMTQTPLSLSVTPGQPASISCKSSQSLLHSDGKTYLFWYLQKPGQPPQLLISEVSNRFSGVPDRFSGSGSGTDFTLKISRVEAEDVGFYYCMQSLRLPLTFGGGTKVEIKRTVAAPSVFIFPPSDEQLKSGTASVVCLLNNFYPREAKVQWKVDNALQSGNSQESVTEQDSKDSTYSLSSTLTLSKADYEKHKVYACEVTHQGLSSPVTKSFNRGEC

SEQ ID NO: 30 - protein, 482 aa, Artificial Sequence
  Synthetic Polypeptide
QVQLVESGGGVVQPGRSLRLSCAASGFTFSSYGMHWVRQAPGKGLEWVAVISYDGSNKYYADSVKGRFTISRDNSKNTLYLQMNSLRAEDTAVYYCARGRYFDWFLFDYWGQGTLVTVSSASTKGPSVFPLAPSSKSTSGGTAALGCLVKDYFPEPVTVSWNSGALTSGVHTFPAVLQSSGLYSLSSVVTVPSSSLGTQTYICNVNHKPSNTKVDKKVEPKSCGGGGQGGGGQGGGGQGGGGQGGGGQGGGGQGGGGQGGGGQDTVMTQTPLSLSVTPGQPASISCKSSQSLLHSDGKTYLFWYLQKPGQPPQLLISEVSNRFSGVPDRFSGSGSGTDFTLKISRVEAEDVGFYYCMQSLRLPLTFGGGTKVEIKRTVAAPSVFIFPPSDEQLKSGTASVVCLLNNFYPREAKVQWKVDNALQSGNSQESVTEQDSKDSTYSLSSTLTLSKADYEKHKVYACEVTHQGLSSPVTKSFNRGEC

SEQ ID NO: 31 - protein, 737 aa, Artificial Sequence
  Synthetic Polypeptide
QVQLVESGGGVVQPGRSLRLSCAASGFTFSSYGMHWVRQAPGKGLEWVAVISYDGSNKYYADSVKGRFTISRDNSKNTLYLQMNSLRAEDTAVYYCARGRYFDWFLFDYWGQGTLVTVSSASTKGPSVFPLAPSSKSTSGGTAALGCLVKDYFPEPVTVSWNSGALTSGVHTFPAVLQSSGLYSLSSVVTVPSSSLGTQTYICNVNHKPSNTKVDKKVEPKSCGGGGQGGGGQGGGGQGGGGQGGGGQGGGGQGGGGQGGGGQDTVMTQTPLSLSVTPGQPASISCKSSQSLLHSDGKTYLFWYLQKPGQPPQLLISEVSNRFSGVPDRFSGSGSGTDFTLKISRVEAEDVGFYYCMQSLRLPLTFGGGTKVEIKRTVAAPSVFIFPPSDEQLKSGTASVVCLLNNFYPREAKVQWKVDNALQSGNSQESVTEQDSKDSTYSLSSTLTLSKADYEKHKVYACEVTHQGLSSPVTKSFNRGECSGGGGQEVQLVESGGGLVQPGGSLKLSCAASGFTFNKYAINWVRQAPGKGLEWVARIRSKYNNYATYYADAVKDRFTISRDDSKNTVYLQMNNLKTEDTAVYYCARAGNFGSSYISYWAYWGQGTLVTVSSGGGGQGGGGQGGGGQQTVVTQEPSLTVSPGGTVTITCGSSTGAVTSGNYPNWVQKKPGQAPRGLIGGTKFLAPGTPARFSGSLSGGKAALTLSGVQPEDEAEYYCVLWYSNRWVFGSGTKLTVL

SEQ ID NO: 32 - protein, 1215 aa, Artificial Sequence
  Synthetic Polypeptide
QVQLVESGGGVVQPGRSLRLSCAASGFTFSSYGMHWVRQAPGKGLEWVAVISYDGSNKYYADSVKGRFTISRDNSKNTLYLQMNSLRAEDTAVYYCARGRYFDWFLFDYWGQGTLVTVSSASTKGPSVFPLAPSSKSTSGGTAALGCLVKDYFPEPVTVSWNSGALTSGVHTFPAVLQSSGLYSLSSVVTVPSSSLGTQTYICNVNHKPSNTKVDKKVEPKSCGGGGQGGGGQGGGGQGGGGQGGGGQGGGGQGGGGQGGGGQDTVMTQTPLSLSVTPGQPASISCKSSQSLLHSDGKTYLFWYLQKPGQPPQLLISEVSNRFSGVPDRFSGSGSGTDFTLKISRVEAEDVGFYYCMQSLRLPLTFGGGTKVEIKRTVAAPSVFIFPPSDEQLKSGTASVVCLLNNFYPREAKVQWKVDNALQSGNSQESVTEQDSKDSTYSLSSTLTLSKADYEKHKVYACEVTHQGLSSPVTKSFNRGECSGGGGQEVQLVESGGGLVQPGGSLKLSCAASGFTFNKYAINWVRQAPGKGLEWVARIRSKYNNYATYYADAVKDRFTISRDDSKNTVYLQMNNLKTEDTAVYYCARAGNFGSSYISYWAYWGQGTLVTVSSGGGGQGGGGQGGGGQQTVVTQEPSLTVSPGGTVTITCGSSTGAVTSGNYPNWVQKKPGQAPRGLIGGTKFLAPGTPARFSGSLSGGKAALTLSGVQPEDEAEYYCVLWYSNRWVFGSGTKLTVLGGGGCPPCPAPELLGGPSVFLFPPKPKDTLMISRTPEVTCVVVDVSHEEPEVKFNWYVDGVEVHNAKTKPCEEQYGSTYRCVSVLTVLHQDWLNGKEYKCKVSNKALPAPIEKTISKAKGQPREPQVYTLPPSREEMTKNQVSLTCLVKGFYPSDIAVEWESNGQPENNYKTTPPVLDSDGSFFLYSKLTVDKSRWQQGNVFSCSVMHEALHNHYTQKSLSLSPGKGGGGQGGGGQGGGGQGGGGQGGGGQGGGGQCPPCPAPELLGGPSVFLFPPKPKDTLMISRTPEVTCVVVDVSHEEPEVKFNWYVDGVEVHNAKTKPCEEQYGSTYRCVSVLTVLHQDWLNGKEYKCKVSNKALPAPIEKTISKAKGQPREPQVYTLPPSREEMTKNQVSLTCLVKGFYPSDIAVEWESNGQPENNYKTTPPVLDSDGSFFLYSKLTVDKSRWQQGNVFSCSVMHEALHNHYTQKSLSLSPGK

SEQ ID NO: 33 - protein, 5 aa, Artificial Sequence
  Synthetic Polypeptide
NAWMS

SEQ ID NO: 34 - protein, 19 aa, Artificial Sequence
  Synthetic Polypeptide
RIKRKTDGGTTDYAAPVKG

SEQ ID NO: 35 - protein, 11 aa, Artificial Sequence
  Synthetic Polypeptide
VTLVRGVIFDY

SEQ ID NO: 36 - protein, 12 aa, Artificial Sequence
  Synthetic Polypeptide
RVSQSVSSSQLA

SEQ ID NO: 37 - protein, 7 aa, Artificial Sequence
  Synthetic Polypeptide
GASSRAT

SEQ ID NO: 38 - protein, 8 aa, Artificial Sequence
  Synthetic Polypeptide
QQYGNSRT

SEQ ID NO: 39 - protein, 122 aa, Artificial Sequence
  Synthetic Polypeptide
EVQLVESGGGLVKPGGSLRLACAASGFIFSNAWMSWVRQAPGKCLEWVGRIKRKTDGGTTDYAAPVKGRFTISRDDSKNTLYLLMNSLKIEDTAVYYCTVVTLVRGVIFDYWGQGTLVTVSS

SEQ ID NO: 40 - protein, 107 aa, Artificial Sequence
  Synthetic Polypeptide
EIVLTQFPGTLSLSPGESATLSCRVSQSVSSSQLAWYQQKPGQAPRLLIYGASSRATGIPDRFSGSGSGTDFTLIISRLEPEDFAVYYCQQYGNSRTFGCGTKVEIK

SEQ ID NO: 41 - protein, 244 aa, Artificial Sequence
  Synthetic Polypeptide
EVQLVESGGGLVKPGGSLRLACAASGFIFSNAWMSWVRQAPGKCLEWVGRIKRKTDGGTTDYAAPVKGRFTISRDDSKNTLYLLMNSLKIEDTAVYYCTVVTLVRGVIFDYWGQGTLVTVSSGGGGQGGGGQGGGGQEIVLTQFPGTLSLSPGESATLSCRVSQSVSSSQLAWYQQKPGQAPRLLIYGASSRATGIPDRFSGSGSGTDFTLIISRLEPEDFAVYYCQQYGNSRTFGCGTKVEIK

SEQ ID NO: 42 - protein, 499 aa, Artificial Sequence
  Synthetic Polypeptide
EVQLVESGGGLVKPGGSLRLACAASGFIFSNAWMSWVRQAPGKCLEWVGRIKRKTDGGTTDYAAPVKGRFTISRDDSKNTLYLLMNSLKIEDTAVYYCTVVTLVRGVIFDYWGQGTLVTVSSGGGGQGGGGQGGGGQEIVLTQFPGTLSLSPGESATLSCRVSQSVSSSQLAWYQQKPGQAPRLLIYGASSRATGIPDRFSGSGSGTDFTLIISRLEPEDFAVYYCQQYGNSRTFGCGTKVEIKSGGGGQEVQLVESGGGLVQPGGSLKLSCAASGFTFNKYAINWVRQAPGKGLEWVARIRSKYNNYATYYADAVKDRFTISRDDSKNTVYLQMNNLKTEDTAVYYCARAGNFGSSYISYWAYWGQGTLVTVSSGGGGQGGGGQGGGGQQTVVTQEPSLTVSPGGTVTITCGSSTGAVTSGNYPNWVQKKPGQAPRGLIGGTKFLAPGTPARFSGSLSGGKAALTLSGVQPEDEAEYYCVLWYSNRWVFGSGTKLTVL

SEQ ID NO: 43 - protein, 977 aa, Artificial Sequence
  Synthetic Polypeptide
EVQLVESGGGLVKPGGSLRLACAASGFIFSNAWMSWVRQAPGKCLEWVGRIKRKTDGGTTDYAAPVKGRFTISRDDSKNTLYLLMNSLKIEDTAVYYCTVVTLVRGVIFDYWGQGTLVTVSSGGGGQGGGGQGGGGQEIVLTQFPGTLSLSPGESATLSCRVSQSVSSSQLAWYQQKPGQAPRLLIYGASSRATGIPDRFSGSGSGTDFTLIISRLEPEDFAVYYCQQYGNSRTFGCGTKVEIKSGGGGQEVQLVESGGGLVQPGGSLKLSCAASGFTFNKYAINWVRQAPGKGLEWVARIRSKYNNYATYYADAVKDRFTISRDDSKNTVYLQMNNLKTEDTAVYYCARAGNFGSSYISYWAYWGQGTLVTVSSGGGGQGGGGQGGGGQQTVVTQEPSLTVSPGGTVTITCGSSTGAVTSGNYPNWVQKKPGQAPRGLIGGTKFLAPGTPARFSGSLSGGKAALTLSGVQPEDEAEYYCVLWYSNRWVFGSGTKLTVLGGGGCPPCPAPELLGGPSVFLFPPKPKDTLMISRTPEVTCVVVDVSHEEPEVKFNWYVDGVEVHNAKTKPCEEQYGSTYRCVSVLTVLHQDWLNGKEYKCKVSNKALPAPIEKTISKAKGQPREPQVYTLPPSREEMTKNQVSLTCLVKGFYPSDIAVEWESNGQPENNYKTTPPVLDSDGSFFLYSKLTVDKSRWQQGNVFSCSVMHEALHNHYTQKSLSLSPGKGGGGQGGGGQGGGGQGGGGQGGGGQGGGGQCPPCPAPELLGGPSVFLFPPKPKDTLMISRTPEVTCVVVDVSHEEPEVKFNWYVDGVEVHNAKTKPCEEQYGSTYRCVSVLTVLHQDWLNGKEYKCKVSNKALPAPIEKTISKAKGQPREPQVYTLPPSREEMTKNQVSLTCLVKGFYPSDIAVEWESNGQPENNYKTTPPVLDSDGSFFLYSKLTVDKSRWQQGNVFSCSVMHEALHNHYTQKSLSLSPGK

SEQ ID NO: 44 - protein, 225 aa, Artificial Sequence
  Synthetic Polypeptide
EVQLVESGGGLVKPGGSLRLACAASGFIFSNAWMSWVRQAPGKGLEWVGRIKRKTDGGTTDYAAPVKGRFTISRDDSKNTLYLLMNSLKIEDTAVYYCTVVTLVRGVIFDYWGQGTLVTVSSASTKGPSVFPLAPSSKSTSGGTAALGCLVKDYFPEPVTVSWNSGALTSGVHTFPAVLQSSGLYSLSSVVTVPSSSLGTQTYICNVNHKPSNTKVDKKVEPKSC

SEQ ID NO: 45 - protein, 225 aa, Artificial Sequence; identical to SEQ ID NO: 44
  Synthetic Polypeptide

SEQ ID NO: 46 - protein, 479 aa, Artificial Sequence
  Synthetic Polypeptide
EVQLVESGGGLVKPGGSLRLACAASGFIFSNAWMSWVRQAPGKGLEWVGRIKRKTDGGTTDYAAPVKGRFTISRDDSKNTLYLLMNSLKIEDTAVYYCTVVTLVRGVIFDYWGQGTLVTVSSASTKGPSVFPLAPSSKSTSGGTAALGCLVKDYFPEPVTVSWNSGALTSGVHTFPAVLQSSGLYSLSSVVTVPSSSLGTQTYICNVNHKPSNTKVDKKVEPKSCGGGGQGGGGQGGGGQGGGGQGGGGQGGGGQGGGGQGGGGQEIVLTQFPGTLSLSPGESATLSCRVSQSVSSSQLAWYQQKPGQAPRLLIYGASSRATGIPDRFSGSGSGTDFTLIISRLEPEDFAVYYCQQYGNSRTFGQGTKVEIKRTVAAPSVFIFPPSDEQLKSGTASVVCLLNNFYPREAKVQWKVDNALQSGNSQESVTEQDSKDSTYSLSSTLTLSKADYEKHKVYACEVTHQGLSSPVTKSFNRGEC

SEQ ID NO: 47 - protein, 734 aa, Artificial Sequence
  Synthetic Polypeptide
EVQLVESGGGLVKPGGSLRLACAASGFIFSNAWMSWVRQAPGKGLEWVGRIKRKTDGGTTDYAAPVKGRFTISRDDSKNTLYLLMNSLKIEDTAVYYCTVVTLVRGVIFDYWGQGTLVTVSSASTKGPSVFPLAPSSKSTSGGTAALGCLVKDYFPEPVTVSWNSGALTSGVHTFPAVLQSSGLYSLSSVVTVPSSSLGTQTYICNVNHKPSNTKVDKKVEPKSCGGGGQGGGGQGGGGQGGGGQGGGGQGGGGQGGGGQGGGGQEIVLTQFPGTLSLSPGESATLSCRVSQSVSSSQLAWYQQKPGQAPRLLIYGASSRATGIPDRFSGSGSGTDFTLIISRLEPEDFAVYYCQQYGNSRTFGQGTKVEIKRTVAAPSVFIFPPSDEQLKSGTASVVCLLNNFYPREAKVQWKVDNALQSGNSQESVTEQDSKDSTYSLSSTLTLSKADYEKHKVYACEVTHQGLSSPVTKSFNRGECSGGGGQEVQLVESGGGLVQPGGSLKLSCAASGFTFNKYAINWVRQAPGKGLEWVARIRSKYNNYATYYADAVKDRFTISRDDSKNTVYLQMNNLKTEDTAVYYCARAGNFGSSYISYWAYWGQGTLVTVSSGGGGQGGGGQGGGGQQTVVTQEPSLTVSPGGTVTITCGSSTGAVTSGNYPNWVQKKPGQAPRGLIGGTKFLAPGTPARFSGSLSGGKAALTLSGVQPEDEAEYYCVLWYSNRWVFGSGTKLTVL

SEQ ID NO: 48 - protein, 1212 aa, Artificial Sequence
  Synthetic Polypeptide
EVQLVESGGGLVKPGGSLRLACAASGFIFSNAWMSWVRQAPGKGLEWVGRIKRKTDGGTTDYAAPVKGRFTISRDDSKNTLYLLMNSLKIEDTAVYYCTVVTLVRGVIFDYWGQGTLVTVSSASTKGPSVFPLAPSSKSTSGGTAALGCLVKDYFPEPVTVSWNSGALTSGVHTFPAVLQSSGLYSLSSVVTVPSSSLGTQTYICNVNHKPSNTKVDKKVEPKSCGGGGQGGGGQGGGGQGGGGQGGGGQGGGGQGGGGQGGGGQEIVLTQFPGTLSLSPGESATLSCRVSQSVSSSQLAWYQQKPGQAPRLLIYGASSRATGIPDRFSGSGSGTDFTLIISRLEPEDFAVYYCQQYGNSRTFGQGTKVEIKRTVAAPSVFIFPPSDEQLKSGTASVVCLLNNFYPREAKVQWKVDNALQSGNSQESVTEQDSKDSTYSLSSTLTLSKADYEKHKVYACEVTHQGLSSPVTKSFNRGECSGGGGQEVQLVESGGGLVQPGGSLKLSCAASGFTFNKYAINWVRQAPGKGLEWVARIRSKYNNYATYYADAVKDRFTISRDDSKNTVYLQMNNLKTEDTAVYYCARAGNFGSSYISYWAYWGQGTLVTVSSGGGGQGGGGQGGGGQQTVVTQEPSLTVSPGGTVTITCGSSTGAVTSGNYPNWVQKKPGQAPRGLIGGTKFLAPGTPARFSGSLSGGKAALTLSGVQPEDEAEYYCVLWYSNRWVFGSGTKLTVLGGGGCPPCPAPELLGGPSVFLFPPKPKDTLMISRTPEVTCVVVDVSHEEPEVKFNWYVDGVEVHNAKTKPCEEQYGSTYRCVSVLTVLHQDWLNGKEYKCKVSNKALPAPIEKTISKAKGQPREPQVYTLPPSREEMTKNQVSLTCLVKGFYPSDIAVEWESNGQPENNYKTTPPVLDSDGSFFLYSKLTVDKSRWQQGNVFSCSVMHEALHNHYTQKSLSLSPGKGGGGQGGGGQGGGGQGGGGQGGGGQGGGGQCPPCPAPELLGGPSVFLFPPKPKDTLMISRTPEVTCVVVDVSHEEPEVKFNWYVDGVEVHNAKTKPCEEQYGSTYRCVSVLTVLHQDWLNGKEYKCKVSNKALPAPIEKTISKAKGQPREPQVYTLPPSREEMTKNQVSLTCLVKGFYPSDIAVEWESNGQPENNYKTTPPVLDSDGSFFLYSKLTVDKSRWQQGNVFSCSVMHEALHNHYTQKSLSLSPGK

SEQ ID NO: 49 - protein, 5 aa, Artificial Sequence
  Synthetic Polypeptide
NYGMH

SEQ ID NO: 50 - protein, 5 aa, Artificial Sequence
  Synthetic Polypeptide
NYGMH

SEQ ID NO: 51 - protein, 9 aa, Artificial Sequence
  Synthetic Polypeptide
AGGIGRFDY

SEQ ID NO: 52 - protein, 16 aa, Artificial Sequence
  Synthetic Polypeptide
KYSQSLLHSDGKTYLF

SEQ ID NO: 53 - protein, 7 aa, Artificial Sequence
  Synthetic Polypeptide
EVSNRFS

SEQ ID NO: 54 - protein, 9 aa, Artificial Sequence
  Synthetic Polypeptide
MQTLKLPLT

SEQ ID NO: 55 - protein, 118 aa, Artificial Sequence
  Synthetic Polypeptide
QVQLVESGGGVVQPGRSLRLSCAASGFTFSNYGMHWVRQAPGKCLEWVAVISYDGSNKFYADSVKGRFTISRDNSKKTLYLQMSSLRVEDTAVYYCARAGGIGRFDYWGQGTLVTVSS

SEQ ID NO: 56 - protein, 224 aa, Artificial Sequence
  Synthetic Polypeptide
DFVMTQTPLSLSVTPGQPASISCKYSQSLLHSDGKTYLFWYLQKPGQPPHLLIYEVSNRFSGVPDRFSGSGSGTDFTLKISRVEAEDVGLYYCMQTLKLPLTFGCGTKVEINDFVMTQTPLSLSVTPGQPASISCKYSQSLLHSDGKTYLFWYLQKPGQPPHLLIYEVSNRFSGVPDRFSGSGSGTDFTLKISRVEAEDVGLYYCMQTLKLPLTFGCGTKVEIN

SEQ ID NO: 57 - protein, 245 aa, Artificial Sequence
  Synthetic Polypeptide
QVQLVESGGGVVQPGRSLRLSCAASGFTFSNYGMHWVRQAPGKCLEWVAVISYDGSNKFYADSVKGRFTISRDNSKKTLYLQMSSLRVEDTAVYYCARAGGIGRFDYWGQGTLVTVSSGGGGQGGGGQGGGGQDFVMTQTPLSLSVTPGQPASISCKYSQSLLHSDGKTYLFWYLQKPGQPPHLLIYEVSNRFSGVPDRFSGSGSGTDFTLKISRVEAEDVGLYYCMQTLKLPLTFGCGTKVEIN

SEQ ID NO: 58 - protein, 500 aa, Artificial Sequence
  Synthetic Polypeptide
QVQLVESGGGVVQPGRSLRLSCAASGFTFSNYGMHWVRQAPGKCLEWVAVISYDGSNKFYADSVKGRFTISRDNSKKTLYLQMSSLRVEDTAVYYCARAGGIGRFDYWGQGTLVTVSSGGGGQGGGGQGGGGQDFVMTQTPLSLSVTPGQPASISCKYSQSLLHSDGKTYLFWYLQKPGQPPHLLIYEVSNRFSGVPDRFSGSGSGTDFTLKISRVEAEDVGLYYCMQTLKLPLTFGCGTKVEINSGGGGQEVQLVESGGGLVQPGGSLKLSCAASGFTFNKYAINWVRQAPGKGLEWVARIRSKYNNYATYYADAVKDRFTISRDDSKNTVYLQMNNLKTEDTAVYYCARAGNFGSSYISYWAYWGQGTLVTVSSGGGGQGGGGQGGGGQQTVVTQEPSLTVSPGGTVTITCGSSTGAVTSGNYPNWVQKKPGQAPRGLIGGTKFLAPGTPARFSGSLSGGKAALTLSGVQPEDEAEYYCVLWYSNRWVFGSGTKLTVL

SEQ ID NO: 59 - protein, 978 aa, Artificial Sequence
  Synthetic Polypeptide
QVQLVESGGGVVQPGRSLRLSCAASGFTFSNYGMHWVRQAPGKCLEWVAVISYDGSNKFYADSVKGRFTISRDNSKKTLYLQMSSLRVEDTAVYYCARAGGIGRFDYWGQGTLVTVSSGGGGQGGGGQGGGGQDFVMTQTPLSLSVTPGQPASISCKYSQSLLHSDGKTYLFWYLQKPGQPPHLLIYEVSNRFSGVPDRFSGSGSGTDFTLKISRVEAEDVGLYYCMQTLKLPLTFGCGTKVEINSGGGGQEVQLVESGGGLVQPGGSLKLSCAASGFTFNKYAINWVRQAPGKGLEWVARIRSKYNNYATYYADAVKDRFTISRDDSKNTVYLQMNNLKTEDTAVYYCARAGNFGSSYISYWAYWGQGTLVTVSSGGGGQGGGGQGGGGQQTVVTQEPSLTVSPGGTVTITCGSSTGAVTSGNYPNWVQKKPGQAPRGLIGGTKFLAPGTPARFSGSLSGGKAALTLSGVQPEDEAEYYCVLWYSNRWVFGSGTKLTVLGGGGCPPCPAPELLGGPSVFLFPPKPKDTLMISRTPEVTCVVVDVSHEEPEVKFNWYVDGVEVHNAKTKPCEEQYGSTYRCVSVLTVLHQDWLNGKEYKCKVSNKALPAPIEKTISKAKGQPREPQVYTLPPSREEMTKNQVSLTCLVKGFYPSDIAVEWESNGQPENNYKTTPPVLDSDGSFFLYSKLTVDKSRWQQGNVFSCSVMHEALHNHYTQKSLSLSPGKGGGGQGGGGQGGGGQGGGGQGGGGQGGGGQCPPCPAPELLGGPSVFLFPPKPKDTLMISRTPEVTCVVVDVSHEEPEVKFNWYVDGVEVHNAKTKPCEEQYGSTYRCVSVLTVLHQDWLNGKEYKCKVSNKALPAPIEKTISKAKGQPREPQVYTLPPSREEMTKNQVSLTCLVKGFYPSDIAVEWESNGQPENNYKTTPPVLDSDGSFFLYSKLTVDKSRWQQGNVFSCSVMHEALHNHYTQKSLSLSPGK

SEQ ID NO: 60 - protein, 978 aa, Artificial Sequence; identical to SEQ ID NO: 59
  Synthetic Polypeptide

SEQ ID NO: 61 - protein, 978 aa, Artificial Sequence; identical to SEQ ID NO: 59
  Synthetic Polypeptide

SEQ ID NO: 62 - protein, 480 aa, Artificial Sequence
  Synthetic Polypeptide
QVQLVESGGGVVQPGRSLRLSCAASGFTFSNYGMHWVRQAPGKGLEWVAVISYDGSNKFYADSVKGRFTISRDNSKKTLYLQMSSLRVEDTAVYYCARAGGIGRFDYWGQGTLVTVSSASTKGPSVFPLAPSSKSTSGGTAALGCLVKDYFPEPVTVSWNSGALTSGVHTFPAVLQSSGLYSLSSVVTVPSSSLGTQTYICNVNHKPSNTKVDKKVEPKSCGGGGQGGGGQGGGGQGGGGQGGGGQGGGGQGGGGQGGGGQDFVMTQTPLSLSVTPGQPASISCKYSQSLLHSDGKTYLFWYLQKPGQPPHLLIYEVSNRFSGVPDRFSGSGSGTDFTLKISRVEAEDVGLYYCMQTLKLPLTFGGGTKVEINRTVAAPSVFIFPPSDEQLKSGTASVVCLLNNFYPREAKVQWKVDNALQSGNSQESVTEQDSKDSTYSLSSTLTLSKADYEKHKVYACEVTHQGLSSPVTKSFNRGEC

SEQ ID NO: 63 - protein, 735 aa, Artificial Sequence
  Synthetic Polypeptide
QVQLVESGGGVVQPGRSLRLSCAASGFTFSNYGMHWVRQAPGKGLEWVAVISYDGSNKFYADSVKGRFTISRDNSKKTLYLQMSSLRVEDTAVYYCARAGGIGRFDYWGQGTLVTVSSASTKGPSVFPLAPSSKSTSGGTAALGCLVKDYFPEPVTVSWNSGALTSGVHTFPAVLQSSGLYSLSSVVTVPSSSLGTQTYICNVNHKPSNTKVDKKVEPKSCGGGGQGGGGQGGGGQGGGGQGGGGQGGGGQGGGGQGGGGQDFVMTQTPLSLSVTPGQPASISCKYSQSLLHSDGKTYLFWYLQKPGQPPHLLIYEVSNRFSGVPDRFSGSGSGTDFTLKISRVEAEDVGLYYCMQTLKLPLTFGGGTKVEINRTVAAPSVFIFPPSDEQLKSGTASVVCLLNNFYPREAKVQWKVDNALQSGNSQESVTEQDSKDSTYSLSSTLTLSKADYEKHKVYACEVTHQGLSSPVTKSFNRGECSGGGGQEVQLVESGGGLVQPGGSLKLSCAASGFTFNKYAINWVRQAPGKGLEWVARIRSKYNNYATYYADAVKDRFTISRDDSKNTVYLQMNNLKTEDTAVYYCARAGNFGSSYISYWAYWGQGTLVTVSSGGGGQGGGGQGGGGQQTVVTQEPSLTVSPGGTVTITCGSSTGAVTSGNYPNWVQKKPGQAPRGLIGGTKFLAPGTPARFSGSLSGGKAALTLSGVQPEDEAEYYCVLWYSNRWVFGSGTKLTVL

SEQ ID NO: 64 - protein, 1213 aa, Artificial Sequence
  Synthetic Polypeptide
QVQLVESGGGVVQPGRSLRLSCAASGFTFSNYGMHWVRQAPGKGLEWVAVISYDGSNKFYADSVKGRFTISRDNSKKTLYLQMSSLRVEDTAVYYCARAGGIGRFDYWGQGTLVTVSSASTKGPSVFPLAPSSKSTSGGTAALGCLVKDYFPEPVTVSWNSGALTSGVHTFPAVLQSSGLYSLSSVVTVPSSSLGTQTYICNVNHKPSNTKVDKKVEPKSCGGGGQGGGGQGGGGQGGGGQGGGGQGGGGQGGGGQGGGGQDFVMTQTPLSLSVTPGQPASISCKYSQSLLHSDGKTYLFWYLQKPGQPPHLLIYEVSNRFSGVPDRFSGSGSGTDFTLKISRVEAEDVGLYYCMQTLKLPLTFGGGTKVEINRTVAAPSVFIFPPSDEQLKSGTASVVCLLNNFYPREAKVQWKVDNALQSGNSQESVTEQDSKDSTYSLSSTLTLSKADYEKHKVYACEVTHQGLSSPVTKSFNRGECSGGGGQEVQLVESGGGLVQPGGSLKLSCAASGFTFNKYAINWVRQAPGKGLEWVARIRSKYNNYATYYADAVKDRFTISRDDSKNTVYLQMNNLKTEDTAVYYCARAGNFGSSYISYWAYWGQGTLVTVSSGGGGQGGGGQGGGGQQTVVTQEPSLTVSPGGTVTITCGSSTGAVTSGNYPNWVQKKPGQAPRGLIGGTKFLAPGTPARFSGSLSGGKAALTLSGVQPEDEAEYYCVLWYSNRWVFGSGTKLTVLGGGGCPPCPAPELLGGPSVFLFPPKPKDTLMISRTPEVTCVVVDVSHEEPEVKFNWYVDGVEVHNAKTKPCEEQYGSTYRCVSVLTVLHQDWLNGKEYKCKVSNKALPAPIEKTISKAKGQPREPQVYTLPPSREEMTKNQVSLTCLVKGFYPSDIAVEWESNGQPENNYKTTPPVLDSDGSFFLYSKLTVDKSRWQQGNVFSCSVMHEALHNHYTQKSLSLSPGKGGGGQGGGGQGGGGQGGGGQGGGGQGGGGQCPPCPAPELLGGPSVFLFPPKPKDTLMISRTPEVTCVVVDVSHEEPEVKFNWYVDGVEVHNAKTKPCEEQYGSTYRCVSVLTVLHQDWLNGKEYKCKVSNKALPAPIEKTISKAKGQPREPQVYTLPPSREEMTKNQVSLTCLVKGFYPSDIAVEWESNGQPENNYKTTPPVLDSDGSFFLYSKLTVDKSRWQQGNVFSCSVMHEALHNHYTQKSLSLSPGK

SEQ ID NO: 65 - protein, 5 aa, Artificial Sequence
  Synthetic Polypeptide
NAWMS

SEQ ID NO: 66 - protein, 19 aa, Artificial Sequence
  Synthetic Polypeptide
RIKRKTDGGTTDYAAPVKG

SEQ ID NO: 67 - protein, 11 aa, Artificial Sequence
  Synthetic Polypeptide
VTLVRGIIFDY

SEQ ID NO: 68 - protein, 12 aa, Artificial Sequence
  Synthetic Polypeptide
RVSQSVSSSQLA

SEQ ID NO: 69 - protein, 7 aa, Artificial Sequence
  Synthetic Polypeptide
GASSRAT

SEQ ID NO: 70 - protein, 8 aa, Artificial Sequence
  Synthetic Polypeptide
QQYGNSRT

SEQ ID NO: 71 - protein, 122 aa, Artificial Sequence
  Synthetic Polypeptide
EVQLVESGGGLVKPGGSLRLSCAASGFIFSNAWMSWVRQAPGKCLEWVGRIKRKTDGGTTDYAAPVKGRFTISRDDSKNTLYLLMNSLKIEDTAVYYCTVVTLVRGIIFDYWGQGTLVTVSS

SEQ ID NO: 72 - protein, 107 aa, Artificial Sequence
  Synthetic Polypeptide
EIVLTQSPGTLSLSPGESATLSCRVSQSVSSSQLAWYQQKPGQAPRLLIYGASSRATGIPDRFSGSGSGTDFTLTISRLEPEDFAVYYCQQYGNSRTFGCGTKVEIK

SEQ ID NO: 73 - protein, 244 aa, Artificial Sequence
  Synthetic Polypeptide
EVQLVESGGGLVKPGGSLRLSCAASGFIFSNAWMSWVRQAPGKCLEWVGRIKRKTDGGTTDYAAPVKGRFTISRDDSKNTLYLLMNSLKIEDTAVYYCTVVTLVRGIIFDYWGQGTLVTVSSGGGGQGGGGQGGGGQEIVLTQSPGTLSLSPGESATLSCRVSQSVSSSQLAWYQQKPGQAPRLLIYGASSRATGIPDRFSGSGSGTDFTLTISRLEPEDFAVYYCQQYGNSRTFGCGTKVEIK

SEQ ID NO: 74 - protein, 499 aa, Artificial Sequence
  Synthetic Polypeptide
EVQLVESGGGLVKPGGSLRLSCAASGFIFSNAWMSWVRQAPGKCLEWVGRIKRKTDGGTTDYAAPVKGRFTISRDDSKNTLYLLMNSLKIEDTAVYYCTVVTLVRGIIFDYWGQGTLVTVSSGGGGQGGGGQGGGGQEIVLTQSPGTLSLSPGESATLSCRVSQSVSSSQLAWYQQKPGQAPRLLIYGASSRATGIPDRFSGSGSGTDFTLTISRLEPEDFAVYYCQQYGNSRTFGCGTKVEIKSGGGGQEVQLVESGGGLVQPGGSLKLSCAASGFTFNKYAINWVRQAPGKGLEWVARIRSKYNNYATYYADAVKDRFTISRDDSKNTVYLQMNNLKTEDTAVYYCARAGNFGSSYISYWAYWGQGTLVTVSSGGGGQGGGGQGGGGQQTVVTQEPSLTVSPGGTVTITCGSSTGAVTSGNYPNWVQKKPGQAPRGLIGGTKFLAPGTPARFSGSLSGGKAALTLSGVQPEDEAEYYCVLWYSNRWVFGSGTKLTVL

SEQ ID NO: 75 - protein, 499 aa, Artificial Sequence; identical to SEQ ID NO: 74
  Synthetic Polypeptide

SEQ ID NO: 76 - protein, 225 aa, Artificial Sequence
  Synthetic Polypeptide
EVQLVESGGGLVKPGGSLRLSCAASGFIFSNAWMSWVRQAPGKGLEWVGRIKRKTDGGTTDYAAPVKGRFTISRDDSKNTLYLLMNSLKIEDTAVYYCTVVTLVRGIIFDYWGQGTLVTVSSASTKGPSVFPLAPSSKSTSGGTAALGCLVKDYFPEPVTVSWNSGALTSGVHTFPAVLQSSGLYSLSSVVTVPSSSLGTQTYICNVNHKPSNTKVDKKVEPKSC

SEQ ID NO: 77 - protein, 214 aa, Artificial Sequence
  Synthetic Polypeptide
EIVLTQSPGTLSLSPGESATLSCRVSQSVSSSQLAWYQQKPGQAPRLLIYGASSRATGIPDRFSGSGSGTDFTLTISRLEPEDFAVYYCQQYGNSRTFGQGTKVEIKRTVAAPSVFIFPPSDEQLKSGTASVVCLLNNFYPREAKVQWKVDNALQSGNSQESVTEQDSKDSTYSLSSTLTLSKADYEKHKVYACEVTHQGLSSPVTKSFNRGEC

SEQ ID NO: 78 - protein, 479 aa, Artificial Sequence
  Synthetic Polypeptide
EVQLVESGGGLVKPGGSLRLSCAASGFIFSNAWMSWVRQAPGKGLEWVGRIKRKTDGGTTDYAAPVKGRFTISRDDSKNTLYLLMNSLKIEDTAVYYCTVVTLVRGIIFDYWGQGTLVTVSSASTKGPSVFPLAPSSKSTSGGTAALGCLVKDYFPEPVTVSWNSGALTSGVHTFPAVLQSSGLYSLSSVVTVPSSSLGTQTYICNVNHKPSNTKVDKKVEPKSCGGGGQGGGGQGGGGQGGGGQGGGGQGGGGQGGGGQGGGGQEIVLTQSPGTLSLSPGESATLSCRVSQSVSSSQLAWYQQKPGQAPRLLIYGASSRATGIPDRFSGSGSGTDFTLTISRLEPEDFAVYYCQQYGNSRTFGQGTKVEIKRTVAAPSVFIFPPSDEQLKSGTASVVCLLNNFYPREAKVQWKVDNALQSGNSQESVTEQDSKDSTYSLSSTLTLSKADYEKHKVYACEVTHQGLSSPVTKSFNRGEC

SEQ ID NO: 79 - protein, 479 aa, Artificial Sequence; identical to SEQ ID NO: 78
  Synthetic Polypeptide

SEQ ID NO: 80 - protein, 1212 aa, Artificial Sequence
  Synthetic Polypeptide
EVQLVESGGGLVKPGGSLRLSCAASGFIFSNAWMSWVRQAPGKGLEWVGRIKRKTDGGTTDYAAPVKGRFTISRDDSKNTLYLLMNSLKIEDTAVYYCTVVTLVRGIIFDYWGQGTLVTVSSASTKGPSVFPLAPSSKSTSGGTAALGCLVKDYFPEPVTVSWNSGALTSGVHTFPAVLQSSGLYSLSSVVTVPSSSLGTQTYICNVNHKPSNTKVDKKVEPKSCGGGGQGGGGQGGGGQGGGGQGGGGQGGGGQGGGGQGGGGQEIVLTQSPGTLSLSPGESATLSCRVSQSVSSSQLAWYQQKPGQAPRLLIYGASSRATGIPDRFSGSGSGTDFTLTISRLEPEDFAVYYCQQYGNSRTFGQGTKVEIKRTVAAPSVFIFPPSDEQLKSGTASVVCLLNNFYPREAKVQWKVDNALQSGNSQESVTEQDSKDSTYSLSSTLTLSKADYEKHKVYACEVTHQGLSSPVTKSFNRGECSGGGGQEVQLVESGGGLVQPGGSLKLSCAASGFTFNKYAINWVRQAPGKGLEWVARIRSKYNNYATYYADAVKDRFTISRDDSKNTVYLQMNNLKTEDTAVYYCARAGNFGSSYISYWAYWGQGTLVTVSSGGGGQGGGGQGGGGQQTVVTQEPSLTVSPGGTVTITCGSSTGAVTSGNYPNWVQKKPGQAPRGLIGGTKFLAPGTPARFSGSLSGGKAALTLSGVQPEDEAEYYCVLWYSNRWVFGSGTKLTVLGGGGCPPCPAPELLGGPSVFLFPPKPKDTLMISRTPEVTCVVVDVSHEEPEVKFNWYVDGVEVHNAKTKPCEEQYGSTYRCVSVLTVLHQDWLNGKEYKCKVSNKALPAPIEKTISKAKGQPREPQVYTLPPSREEMTKNQVSLTCLVKGFYPSDIAVEWESNGQPENNYKTTPPVLDSDGSFFLYSKLTVDKSRWQQGNVFSCSVMHEALHNHYTQKSLSLSPGKGGGGQGGGGQGGGGQGGGGQGGGGQGGGGQCPPCPAPELLGGPSVFLFPPKPKDTLMISRTPEVTCVVVDVSHEEPEVKFNWYVDGVEVHNAKTKPCEEQYGSTYRCVSVLTVLHQDWLNGKEYKCKVSNKALPAPIEKTISKAKGQPREPQVYTLPPSREEMTKNQVSLTCLVKGFYPSDIAVEWESNGQPENNYKTTPPVLDSDGSFFLYSKLTVDKSRWQQGNVFSCSVMHEALHNHYTQKSLSLSPGK

SEQ ID NO: 81 - protein, 5 aa, Artificial Sequence
  Synthetic Polypeptide
NAWMS

SEQ ID NO: 82 - protein, 19 aa, Artificial Sequence
  Synthetic Polypeptide
RIKRKTDGGTTDYAAPVKG

SEQ ID NO: 83 - protein, 11 aa, Artificial Sequence
  Synthetic Polypeptide
VTLVRGVIFDY

SEQ ID NO: 84 - protein, 12 aa, Artificial Sequence
  Synthetic Polypeptide
RASQSVSSSQLA

SEQ ID NO: 85 - protein, 7 aa, Artificial Sequence
  Synthetic Polypeptide
GASSRAT

SEQ ID NO: 86 - protein, 8 aa, Artificial Sequence
  Synthetic Polypeptide
QQYGNSRT

SEQ ID NO: 87 - protein, 122 aa, Artificial Sequence
  Synthetic Polypeptide
EVQLVESGGDLVKPGGSLRLSCAASGFIFSNAWMSWVRQAPGKCLEWVGRIKRKTDGGTTDYAAPVKGRFTISRDDSKNTLYLLMNSLKIEDTAVYYCTVVTLVRGVIFDYWGQGTLVTVSS

SEQ ID NO: 88 - protein, 107 aa, Artificial Sequence
  Synthetic Polypeptide
EIVLTQSPGTLSLSPGESATLSCRASQSVSSSQLAWYQQKPGQTPRLLIYGASSRATGIPDRFSGSGSGTDFTLTISRLEPEDFAVYYCQQYGNSRTFGCGTKVEIK

SEQ ID NO: 89 - protein, 244 aa, Artificial Sequence
  Synthetic Polypeptide
EVQLVESGGDLVKPGGSLRLSCAASGFIFSNAWMSWVRQAPGKCLEWVGRIKRKTDGGTTDYAAPVKGRFTISRDDSKNTLYLLMNSLKIEDTAVYYCTVVTLVRGVIFDYWGQGTLVTVSSGGGGQGGGGQGGGGQEIVLTQSPGTLSLSPGESATLSCRASQSVSSSQLAWYQQKPGQTPRLLIYGASSRATGIPDRFSGSGSGTDFTLTISRLEPEDFAVYYCQQYGNSRTFGCGTKVEIK

SEQ ID NO: 90 - protein, 499 aa, Artificial Sequence
  Synthetic Polypeptide
EVQLVESGGDLVKPGGSLRLSCAASGFIFSNAWMSWVRQAPGKCLEWVGRIKRKTDGGTTDYAAPVKGRFTISRDDSKNTLYLLMNSLKIEDTAVYYCTVVTLVRGVIFDYWGQGTLVTVSSGGGGQGGGGQGGGGQEIVLTQSPGTLSLSPGESATLSCRASQSVSSSQLAWYQQKPGQTPRLLIYGASSRATGIPDRFSGSGSGTDFTLTISRLEPEDFAVYYCQQYGNSRTFGCGTKVEIKSGGGGQEVQLVESGGGLVQPGGSLKLSCAASGFTFNKYAINWVRQAPGKGLEWVARIRSKYNNYATYYADAVKDRFTISRDDSKNTVYLQMNNLKTEDTAVYYCARAGNFGSSYISYWAYWGQGTLVTVSSGGGGQGGGGQGGGGQQTVVTQEPSLTVSPGGTVTITCGSSTGAVTSGNYPNWVQKKPGQAPRGLIGGTKFLAPGTPARFSGSLSGGKAALTLSGVQPEDEAEYYCVLWYSNRWVFGSGTKLTVL

SEQ ID NO: 91 - protein, 977 aa, Artificial Sequence
  Synthetic Polypeptide
EVQLVESGGDLVKPGGSLRLSCAASGFIFSNAWMSWVRQAPGKCLEWVGRIKRKTDGGTTDYAAPVKGRFTISRDDSKNTLYLLMNSLKIEDTAVYYCTVVTLVRGVIFDYWGQGTLVTVSSGGGGQGGGGQGGGGQEIVLTQSPGTLSLSPGESATLSCRASQSVSSSQLAWYQQKPGQTPRLLIYGASSRATGIPDRFSGSGSGTDFTLTISRLEPEDFAVYYCQQYGNSRTFGCGTKVEIKSGGGGQEVQLVESGGGLVQPGGSLKLSCAASGFTFNKYAINWVRQAPGKGLEWVARIRSKYNNYATYYADAVKDRFTISRDDSKNTVYLQMNNLKTEDTAVYYCARAGNFGSSYISYWAYWGQGTLVTVSSGGGGQGGGGQGGGGQQTVVTQEPSLTVSPGGTVTITCGSSTGAVTSGNYPNWVQKKPGQAPRGLIGGTKFLAPGTPARFSGSLSGGKAALTLSGVQPEDEAEYYCVLWYSNRWVFGSGTKLTVLGGGGCPPCPAPELLGGPSVFLFPPKPKDTLMISRTPEVTCVVVDVSHEEPEVKFNWYVDGVEVHNAKTKPCEEQYGSTYRCVSVLTVLHQDWLNGKEYKCKVSNKALPAPIEKTISKAKGQPREPQVYTLPPSREEMTKNQVSLTCLVKGFYPSDIAVEWESNGQPENNYKTTPPVLDSDGSFFLYSKLTVDKSRWQQGNVFSCSVMHEALHNHYTQKSLSLSPGKGGGGQGGGGQGGGGQGGGGQGGGGQGGGGQCPPCPAPELLGGPSVFLFPPKPKDTLMISRTPEVTCVVVDVSHEEPEVKFNWYVDGVEVHNAKTKPCEEQYGSTYRCVSVLTVLHQDWLNGKEYKCKVSNKALPAPIEKTISKAKGQPREPQVYTLPPSREEMTKNQVSLTCLVKGFYPSDIAVEWESNGQPENNYKTTPPVLDSDGSFFLYSKLTVDKSRWQQGNVFSCSVMHEALHNHYTQKSLSLSPGK

SEQ ID NO: 92 - protein, 225 aa, Artificial Sequence
  Synthetic Polypeptide
EVQLVESGGDLVKPGGSLRLSCAASGFIFSNAWMSWVRQAPGKGLEWVGRIKRKTDGGTTDYAAPVKGRFTISRDDSKNTLYLLMNSLKIEDTAVYYCTVVTLVRGVIFDYWGQGTLVTVSSASTKGPSVFPLAPSSKSTSGGTAALGCLVKDYFPEPVTVSWNSGALTSGVHTFPAVLQSSGLYSLSSVVTVPSSSLGTQTYICNVNHKPSNTKVDKKVEPKSC

SEQ ID NO: 93 - protein, 214 aa, Artificial Sequence
  Synthetic Polypeptide
EIVLTQSPGTLSLSPGESATLSCRASQSVSSSQLAWYQQKPGQTPRLLIYGASSRATGIPDRFSGSGSGTDFTLTISRLEPEDFAVYYCQQYGNSRTFGQGTKVEIKRTVAAPSVFIFPPSDEQLKSGTASVVCLLNNFYPREAKVQWKVDNALQSGNSQESVTEQDSKDSTYSLSSTLTLSKADYEKHKVYACEVTHQGLSSPVTKSFNRGEC

SEQ ID NO: 94 - protein, 479 aa, Artificial Sequence
  Synthetic Polypeptide
EVQLVESGGDLVKPGGSLRLSCAASGFIFSNAWMSWVRQAPGKGLEWVGRIKRKTDGGTTDYAAPVKGRFTISRDDSKNTLYLLMNSLKIEDTAVYYCTVVTLVRGVIFDYWGQGTLVTVSSASTKGPSVFPLAPSSKSTSGGTAALGCLVKDYFPEPVTVSWNSGALTSGVHTFPAVLQSSGLYSLSSVVTVPSSSLGTQTYICNVNHKPSNTKVDKKVEPKSCGGGGQGGGGQGGGGQGGGGQGGGGQGGGGQGGGGQGGGGQEIVLTQSPGTLSLSPGESATLSCRASQSVSSSQLAWYQQKPGQTPRLLIYGASSRATGIPDRFSGSGSGTDFTLTISRLEPEDFAVYYCQQYGNSRTFGQGTKVEIKRTVAAPSVFIFPPSDEQLKSGTASVVCLLNNFYPREAKVQWKVDNALQSGNSQESVTEQDSKDSTYSLSSTLTLSKADYEKHKVYACEVTHQGLSSPVTKSFNRGEC

SEQ ID NO: 95 - protein, 734 aa, Artificial Sequence
  Synthetic Polypeptide
EVQLVESGGDLVKPGGSLRLSCAASGFIFSNAWMSWVRQAPGKGLEWVGRIKRKTDGGTTDYAAPVKGRFTISRDDSKNTLYLLMNSLKIEDTAVYYCTVVTLVRGVIFDYWGQGTLVTVSSASTKGPSVFPLAPSSKSTSGGTAALGCLVKDYFPEPVTVSWNSGALTSGVHTFPAVLQSSGLYSLSSVVTVPSSSLGTQTYICNVNHKPSNTKVDKKVEPKSCGGGGQGGGGQGGGGQGGGGQGGGGQGGGGQGGGGQGGGGQEIVLTQSPGTLSLSPGESATLSCRASQSVSSSQLAWYQQKPGQTPRLLIYGASSRATGIPDRFSGSGSGTDFTLTISRLEPEDFAVYYCQQYGNSRTFGQGTKVEIKRTVAAPSVFIFPPSDEQLKSGTASVVCLLNNFYPREAKVQWKVDNALQSGNSQESVTEQDSKDSTYSLSSTLTLSKADYEKHKVYACEVTHQGLSSPVTKSFNRGECSGGGGQEVQLVESGGGLVQPGGSLKLSCAASGFTFNKYAINWVRQAPGKGLEWVARIRSKYNNYATYYADAVKDRFTISRDDSKNTVYLQMNNLKTEDTAVYYCARAGNFGSSYISYWAYWGQGTLVTVSSGGGGQGGGGQGGGGQQTVVTQEPSLTVSPGGTVTITCGSSTGAVTSGNYPNWVQKKPGQAPRGLIGGTKFLAPGTPARFSGSLSGGKAALTLSGVQPEDEAEYYCVLWYSNRWVFGSGTKLTVL

SEQ ID NO: 96 - protein, 1212 aa, Artificial Sequence
  Synthetic Polypeptide
EVQLVESGGDLVKPGGSLRLSCAASGFIFSNAWMSWVRQAPGKGLEWVGRIKRKTDGGTTDYAAPVKGRFTISRDDSKNTLYLLMNSLKIEDTAVYYCTVVTLVRGVIFDYWGQGTLVTVSSASTKGPSVFPLAPSSKSTSGGTAALGCLVKDYFPEPVTVSWNSGALTSGVHTFPAVLQSSGLYSLSSVVTVPSSSLGTQTYICNVNHKPSNTKVDKKVEPKSCGGGGQGGGGQGGGGQGGGGQGGGGQGGGGQGGGGQGGGGQEIVLTQSPGTLSLSPGESATLSCRASQSVSSSQLAWYQQKPGQTPRLLIYGASSRATGIPDRFSGSGSGTDFTLTISRLEPEDFAVYYCQQYGNSRTFGQGTKVEIKRTVAAPSVFIFPPSDEQLKSGTASVVCLLNNFYPREAKVQWKVDNALQSGNSQESVTEQDSKDSTYSLSSTLTLSKADYEKHKVYACEVTHQGLSSPVTKSFNRGECSGGGGQEVQLVESGGGLVQPGGSLKLSCAASGFTFNKYAINWVRQAPGKGLEWVARIRSKYNNYATYYADAVKDRFTISRDDSKNTVYLQMNNLKTEDTAVYYCARAGNFGSSYISYWAYWGQGTLVTVSSGGGGQGGGGQGGGGQQTVVTQEPSLTVSPGGTVTITCGSSTGAVTSGNYPNWVQKKPGQAPRGLIGGTKFLAPGTPARFSGSLSGGKAALTLSGVQPEDEAEYYCVLWYSNRWVFGSGTKLTVLGGGGCPPCPAPELLGGPSVFLFPPKPKDTLMISRTPEVTCVVVDVSHEEPEVKFNWYVDGVEVHNAKTKPCEEQYGSTYRCVSVLTVLHQDWLNGKEYKCKVSNKALPAPIEKTISKAKGQPREPQVYTLPPSREEMTKNQVSLTCLVKGFYPSDIAVEWESNGQPENNYKTTPPVLDSDGSFFLYSKLTVDKSRWQQGNVFSCSVMHEALHNHYTQKSLSLSPGKGGGGQGGGGQGGGGQGGGGQGGGGQGGGGQCPPCPAPELLGGPSVFLFPPKPKDTLMISRTPEVTCVVVDVSHEEPEVKFNWYVDGVEVHNAKTKPCEEQYGSTYRCVSVLTVLHQDWLNGKEYKCKVSNKALPAPIEKTISKAKGQPREPQVYTLPPSREEMTKNQVSLTCLVKGFYPSDIAVEWESNGQPENNYKTTPPVLDSDGSFFLYSKLTVDKSRWQQGNVFSCSVMHEALHNHYTQKSLSLSPGK

SEQ ID NO: 97 - protein, 5 aa, Artificial Sequence
  Synthetic Polypeptide
NAWMS

SEQ ID NO: 98 - protein, 19 aa, Artificial Sequence
  Synthetic Polypeptide
RIKRRTDGGTTDYAAPVKD

SEQ ID NO: 99 - protein, 11 aa, Artificial Sequence
  Synthetic Polypeptide
VTMVRGVIADY

SEQ ID NO: 100 - protein, 12 aa, Artificial Sequence
  Synthetic Polypeptide
RASQSVSSGSLA

SEQ ID NO: 101 - protein, 7 aa, Artificial Sequence
  Synthetic Polypeptide
GASSRAT

SEQ ID NO: 102 - protein, 8 aa, Artificial Sequence
  Synthetic Polypeptide
QQYGSSRT

SEQ ID NO: 103 - protein, 122 aa, Artificial Sequence
  Synthetic Polypeptide
EVQLVESGGGLVKPGGSLRLSCAASGFIFSNAWMSWVRQAPGKCLEWVARIKRRTDGGTTDYAAPVKDRFTISRDDSKNTLFLQMNSLKTEDTAVYYCTTVTMVRGVIADYWGQGTLVTVSS

SEQ ID NO: 104 - protein, 107 aa, Artificial Sequence
  Synthetic Polypeptide
EIVLTQSPGTLSLSPGERATLSCRASQSVSSGSLAWYQQKLGQAPRLLIYGASSRATGIPDRFSGSGSGTDFTLTISSLEPEDFAVYYCQQYGSSRTFGCGTKVELK

SEQ ID NO: 105 - protein, 244 aa, Artificial Sequence
  Synthetic Polypeptide
EVQLVESGGGLVKPGGSLRLSCAASGFIFSNAWMSWVRQAPGKCLEWVARIKRRTDGGTTDYAAPVKDRFTISRDDSKNTLFLQMNSLKTEDTAVYYCTTVTMVRGVIADYWGQGTLVTVSSGGGGQGGGGQGGGGQEIVLTQSPGTLSLSPGERATLSCRASQSVSSGSLAWYQQKLGQAPRLLIYGASSRATGIPDRFSGSGSGTDFTLTISSLEPEDFAVYYCQQYGSSRTFGCGTKVELK

SEQ ID NO: 106 - protein, 499 aa, Artificial Sequence
  Synthetic Polypeptide
EVQLVESGGGLVKPGGSLRLSCAASGFIFSNAWMSWVRQAPGKCLEWVARIKRRTDGGTTDYAAPVKDRFTISRDDSKNTLFLQMNSLKTEDTAVYYCTTVTMVRGVIADYWGQGTLVTVSSGGGGQGGGGQGGGGQEIVLTQSPGTLSLSPGERATLSCRASQSVSSGSLAWYQQKLGQAPRLLIYGASSRATGIPDRFSGSGSGTDFTLTISSLEPEDFAVYYCQQYGSSRTFGCGTKVELKSGGGGQEVQLVESGGGLVQPGGSLKLSCAASGFTFNKYAINWVRQAPGKGLEWVARIRSKYNNYATYYADAVKDRFTISRDDSKNTVYLQMNNLKTEDTAVYYCARAGNFGSSYISYWAYWGQGTLVTVSSGGGGQGGGGQGGGGQQTVVTQEPSLTVSPGGTVTITCGSSTGAVTSGNYPNWVQKKPGQAPRGLIGGTKFLAPGTPARFSGSLSGGKAALTLSGVQPEDEAEYYCVLWYSNRWVFGSGTKLTVL

SEQ ID NO: 107 - protein, 977 aa, Artificial Sequence
  Synthetic Polypeptide
EVQLVESGGGLVKPGGSLRLSCAASGFIFSNAWMSWVRQAPGKCLEWVARIKRRTDGGTTDYAAPVKDRFTISRDDSKNTLFLQMNSLKTEDTAVYYCTTVTMVRGVIADYWGQGTLVTVSSGGGGQGGGGQGGGGQEIVLTQSPGTLSLSPGERATLSCRASQSVSSGSLAWYQQKLGQAPRLLIYGASSRATGIPDRFSGSGSGTDFTLTISSLEPEDFAVYYCQQYGSSRTFGCGTKVELKSGGGGQEVQLVESGGGLVQPGGSLKLSCAASGFTFNKYAINWVRQAPGKGLEWVARIRSKYNNYATYYADAVKDRFTISRDDSKNTVYLQMNNLKTEDTAVYYCARAGNFGSSYISYWAYWGQGTLVTVSSGGGGQGGGGQGGGGQQTVVTQEPSLTVSPGGTVTITCGSSTGAVTSGNYPNWVQKKPGQAPRGLIGGTKFLAPGTPARFSGSLSGGKAALTLSGVQPEDEAEYYCVLWYSNRWVFGSGTKLTVLGGGGCPPCPAPELLGGPSVFLFPPKPKDTLMISRTPEVTCVVVDVSHEEPEVKFNWYVDGVEVHNAKTKPCEEQYGSTYRCVSVLTVLHQDWLNGKEYKCKVSNKALPAPIEKTISKAKGQPREPQVYTLPPSREEMTKNQVSLTCLVKGFYPSDIAVEWESNGQPENNYKTTPPVLDSDGSFFLYSKLTVDKSRWQQGNVFSCSVMHEALHNHYTQKSLSLSPGKGGGGQGGGGQGGGGQGGGGQGGGGQGGGGQCPPCPAPELLGGPSVFLFPPKPKDTLMISRTPEVTCVVVDVSHEEPEVKFNWYVDGVEVHNAKTKPCEEQYGSTYRCVSVLTVLHQDWLNGKEYKCKVSNKALPAPIEKTISKAKGQPREPQVYTLPPSREEMTKNQVSLTCLVKGFYPSDIAVEWESNGQPENNYKTTPPVLDSDGSFFLYSKLTVDKSRWQQGNVFSCSVMHEALHNHYTQKSLSLSPGK

SEQ ID NO: 108 - protein, 225 aa, Artificial Sequence
  Synthetic Polypeptide
EVQLVESGGGLVKPGGSLRLSCAASGFIFSNAWMSWVRQAPGKGLEWVARIKRRTDGGTTDYAAPVKDRFTISRDDSKNTLFLQMNSLKTEDTAVYYCTTVTMVRGVIADYWGQGTLVTVSSASTKGPSVFPLAPSSKSTSGGTAALGCLVKDYFPEPVTVSWNSGALTSGVHTFPAVLQSSGLYSLSSVVTVPSSSLGTQTYICNVNHKPSNTKVDKKVEPKSC

SEQ ID NO: 109 - protein, 214 aa, Artificial Sequence
  Synthetic Polypeptide
EIVLTQSPGTLSLSPGERATLSCRASQSVSSGSLAWYQQKLGQAPRLLIYGASSRATGIPDRFSGSGSGTDFTLTISSLEPEDFAVYYCQQYGSSRTFGQGTKVELKRTVAAPSVFIFPPSDEQLKSGTASVVCLLNNFYPREAKVQWKVDNALQSGNSQESVTEQDSKDSTYSLSSTLTLSKADYEKHKVYACEVTHQGLSSPVTKSFNRGEC

SEQ ID NO: 110 - protein, 478 aa, Artificial Sequence
  Synthetic Polypeptide
VQLVESGGGLVKPGGSLRLSCAASGFIFSNAWMSWVRQAPGKGLEWVARIKRRTDGGTTDYAAPVKDRFTISRDDSKNTLFLQMNSLKTEDTAVYYCTTVTMVRGVIADYWGQGTLVTVSSASTKGPSVFPLAPSSKSTSGGTAALGCLVKDYFPEPVTVSWNSGALTSGVHTFPAVLQSSGLYSLSSVVTVPSSSLGTQTYICNVNHKPSNTKVDKKVEPKSCGGGGQGGGGQGGGGQGGGGQGGGGQGGGGQGGGGQGGGGQEIVLTQSPGTLSLSPGERATLSCRASQSVSSGSLAWYQQKLGQAPRLLIYGASSRATGIPDRFSGSGSGTDFTLTISSLEPEDFAVYYCQQYGSSRTFGQGTKVELKRTVAAPSVFIFPPSDEQLKSGTASVVCLLNNFYPREAKVQWKVDNALQSGNSQESVTEQDSKDSTYSLSSTLTLSKADYEKHKVYACEVTHQGLSSPVTKSFNRGEC

SEQ ID NO: 111 - protein, 734 aa, Artificial Sequence
  Synthetic Polypeptide
EVQLVESGGGLVKPGGSLRLSCAASGFIFSNAWMSWVRQAPGKGLEWVARIKRRTDGGTTDYAAPVKDRFTISRDDSKNTLFLQMNSLKTEDTAVYYCTTVTMVRGVIADYWGQGTLVTVSSASTKGPSVFPLAPSSKSTSGGTAALGCLVKDYFPEPVTVSWNSGALTSGVHTFPAVLQSSGLYSLSSVVTVPSSSLGTQTYICNVNHKPSNTKVDKKVEPKSCGGGGQGGGGQGGGGQGGGGQGGGGQGGGGQGGGGQGGGGQEIVLTQSPGTLSLSPGERATLSCRASQSVSSGSLAWYQQKLGQAPRLLIYGASSRATGIPDRFSGSGSGTDFTLTISSLEPEDFAVYYCQQYGSSRTFGQGTKVELKRTVAAPSVFIFPPSDEQLKSGTASVVCLLNNFYPREAKVQWKVDNALQSGNSQESVTEQDSKDSTYSLSSTLTLSKADYEKHKVYACEVTHQGLSSPVTKSFNRGECSGGGGQEVQLVESGGGLVQPGGSLKLSCAASGFTFNKYAINWVRQAPGKGLEWVARIRSKYNNYATYYADAVKDRFTISRDDSKNTVYLQMNNLKTEDTAVYYCARAGNFGSSYISYWAYWGQGTLVTVSSGGGGQGGGGQGGGGQQTVVTQEPSLTVSPGGTVTITCGSSTGAVTSGNYPNWVQKKPGQAPRGLIGGTKFLAPGTPARFSGSLSGGKAALTLSGVQPEDEAEYYCVLWYSNRWVFGSGTKLTVL

SEQ ID NO: 112 - protein, 1212 aa, Artificial Sequence
  Synthetic Polypeptide
EVQLVESGGGLVKPGGSLRLSCAASGFIFSNAWMSWVRQAPGKGLEWVARIKRRTDGGTTDYAAPVKDRFTISRDDSKNTLFLQMNSLKTEDTAVYYCTTVTMVRGVIADYWGQGTLVTVSSASTKGPSVFPLAPSSKSTSGGTAALGCLVKDYFPEPVTVSWNSGALTSGVHTFPAVLQSSGLYSLSSVVTVPSSSLGTQTYICNVNHKPSNTKVDKKVEPKSCGGGGQGGGGQGGGGQGGGGQGGGGQGGGGQGGGGQGGGGQEIVLTQSPGTLSLSPGERATLSCRASQSVSSGSLAWYQQKLGQAPRLLIYGASSRATGIPDRFSGSGSGTDFTLTISSLEPEDFAVYYCQQYGSSRTFGQGTKVELKRTVAAPSVFIFPPSDEQLKSGTASVVCLLNNFYPREAKVQWKVDNALQSGNSQESVTEQDSKDSTYSLSSTLTLSKADYEKHKVYACEVTHQGLSSPVTKSFNRGECSGGGGQEVQLVESGGGLVQPGGSLKLSCAASGFTFNKYAINWVRQAPGKGLEWVARIRSKYNNYATYYADAVKDRFTISRDDSKNTVYLQMNNLKTEDTAVYYCARAGNFGSSYISYWAYWGQGTLVTVSSGGGGQGGGGQGGGGQQTVVTQEPSLTVSPGGTVTITCGSSTGAVTSGNYPNWVQKKPGQAPRGLIGGTKFLAPGTPARFSGSLSGGKAALTLSGVQPEDEAEYYCVLWYSNRWVFGSGTKLTVLGGGGCPPCPAPELLGGPSVFLFPPKPKDTLMISRTPEVTCVVVDVSHEEPEVKFNWYVDGVEVHNAKTKPCEEQYGSTYRCVSVLTVLHQDWLNGKEYKCKVSNKALPAPIEKTISKAKGQPREPQVYTLPPSREEMTKNQVSLTCLVKGFYPSDIAVEWESNGQPENNYKTTPPVLDSDGSFFLYSKLTVDKSRWQQGNVFSCSVMHEALHNHYTQKSLSLSPGKGGGGQGGGGQGGGGQGGGGQGGGGQGGGGQCPPCPAPELLGGPSVFLFPPKPKDTLMISRTPEVTCVVVDVSHEEPEVKFNWYVDGVEVHNAKTKPCEEQYGSTYRCVSVLTVLHQDWLNGKEYKCKVSNKALPAPIEKTISKAKGQPREPQVYTLPPSREEMTKNQVSLTCLVKGFYPSDIAVEWESNGQPENNYKTTPPVLDSDGSFFLYSKLTVDKSRWQQGNVFSCSVMHEALHNHYTQKSLSLSPGK

SEQ ID NO: 113 - protein, 5 aa, Artificial Sequence
  Synthetic Polypeptide
NARMG

SEQ ID NO: 114 - protein, 19 aa, Artificial Sequence
  Synthetic Polypeptide
RIKSKTEGGTRDYAAPVKG

SEQ ID NO: 115 - protein, 4 aa, Artificial Sequence
  Synthetic Polypeptide
YSGV

SEQ ID NO: 116 - protein, 17 aa, Artificial Sequence
  Synthetic Polypeptide
KSSQSVLYSSNNKNYLA

SEQ ID NO: 117 - protein, 7 aa, Artificial Sequence
  Synthetic Polypeptide
WASTRES

SEQ ID NO: 118 - protein, 9 aa, Artificial Sequence
  Synthetic Polypeptide
QQYYSIPIT

SEQ ID NO: 119 - protein, 115 aa, Artificial Sequence
  Synthetic Polypeptide
EVQLVESGGGLVKPGGSLRLSCAASGFTFSNARMGWVRQAPGKCLEWVGRIKSKTEGGTRDYAAPVKGRFTISRDDSKNTLYLQMNSLKTEDTAVYYCTSYSGVWGQGTMVTVSS

SEQ ID NO: 120 - protein, 113 aa, Artificial Sequence
  Synthetic Polypeptide
EIVMTQSPDSLAVSLGERATINCKSSQSVLYSSNNKNYLAWYHQKPGQSPKLLISWASTRESGVPDRFSGSGSGTDFTLTINSLQAEDVAVYYCQQYYSIPITFGCGTKVEIK

SEQ ID NO: 121 - protein, 243 aa, Artificial Sequence
  Synthetic Polypeptide
EVQLVESGGGLVKPGGSLRLSCAASGFTFSNARMGWVRQAPGKCLEWVGRIKSKTEGGTRDYAAPVKGRFTISRDDSKNTLYLQMNSLKTEDTAVYYCTSYSGVWGQGTMVTVSSGGGGQGGGGQGGGGQEIVMTQSPDSLAVSLGERATINCKSSQSVLYSSNNKNYLAWYHQKPGQSPKLLISWASTRESGVPDRFSGSGSGTDFTLTINSLQAEDVAVYYCQQYYSIPITFGCGTKVEIK

SEQ ID NO: 122 - protein, 498 aa, Artificial Sequence
  Synthetic Polypeptide
EVQLVESGGGLVKPGGSLRLSCAASGFTFSNARMGWVRQAPGKCLEWVGRIKSKTEGGTRDYAAPVKGRFTISRDDSKNTLYLQMNSLKTEDTAVYYCTSYSGVWGQGTMVTVSSGGGGQGGGGQGGGGQEIVMTQSPDSLAVSLGERATINCKSSQSVLYSSNNKNYLAWYHQKPGQSPKLLISWASTRESGVPDRFSGSGSGTDFTLTINSLQAEDVAVYYCQQYYSIPITFGCGTKVEIKSGGGGQEVQLVESGGGLVQPGGSLKLSCAASGFTFNKYAINWVRQAPGKGLEWVARIRSKYNNYATYYADAVKDRFTISRDDSKNTVYLQMNNLKTEDTAVYYCARAGNFGSSYISYWAYWGQGTLVTVSSGGGGQGGGGQGGGGQQTVVTQEPSLTVSPGGTVTITCGSSTGAVTSGNYPNWVQKKPGQAPRGLIGGTKFLAPGTPARFSGSLSGGKAALTLSGVQPEDEAEYYCVLWYSNRWVFGSGTKLTVL

SEQ ID NO: 123 - protein, 976 aa, Artificial Sequence
  Synthetic Polypeptide
EVQLVESGGGLVKPGGSLRLSCAASGFTFSNARMGWVRQAPGKCLEWVGRIKSKTEGGTRDYAAPVKGRFTISRDDSKNTLYLQMNSLKTEDTAVYYCTSYSGVWGQGTMVTVSSGGGGQGGGGQGGGGQEIVMTQSPDSLAVSLGERATINCKSSQSVLYSSNNKNYLAWYHQKPGQSPKLLISWASTRESGVPDRFSGSGSGTDFTLTINSLQAEDVAVYYCQQYYSIPITFGCGTKVEIKSGGGGQEVQLVESGGGLVQPGGSLKLSCAASGFTFNKYAINWVRQAPGKGLEWVARIRSKYNNYATYYADAVKDRFTISRDDSKNTVYLQMNNLKTEDTAVYYCARAGNFGSSYISYWAYWGQGTLVTVSSGGGGQGGGGQGGGGQQTVVTQEPSLTVSPGGTVTITCGSSTGAVTSGNYPNWVQKKPGQAPRGLIGGTKFLAPGTPARFSGSLSGGKAALTLSGVQPEDEAEYYCVLWYSNRWVFGSGTKLTVLGGGGCPPCPAPELLGGPSVFLFPPKPKDTLMISRTPEVTCVVVDVSHEEPEVKFNWYVDGVEVHNAKTKPCEEQYGSTYRCVSVLTVLHQDWLNGKEYKCKVSNKALPAPIEKTISKAKGQPREPQVYTLPPSREEMTKNQVSLTCLVKGFYPSDIAVEWESNGQPENNYKTTPPVLDSDGSFFLYSKLTVDKSRWQQGNVFSCSVMHEALHNHYTQKSLSLSPGKGGGGQGGGGQGGGGQGGGGQGGGGQGGGGQCPPCPAPELLGGPSVFLFPPKPKDTLMISRTPEVTCVVVDVSHEEPEVKFNWYVDGVEVHNAKTKPCEEQYGSTYRCVSVLTVLHQDWLNGKEYKCKVSNKALPAPIEKTISKAKGQPREPQVYTLPPSREEMTKNQVSLTCLVKGFYPSDIAVEWESNGQPENNYKTTPPVLDSDGSFFLYSKLTVDKSRWQQGNVFSCSVMHEALHNHYTQKSLSLSPGK

SEQ ID NO: 124 - protein, 218 aa, Artificial Sequence
  Synthetic Polypeptide
EVQLVESGGGLVKPGGSLRLSCAASGFTFSNARMGWVRQAPGKGLEWVGRIKSKTEGGTRDYAAPVKGRFTISRDDSKNTLYLQMNSLKTEDTAVYYCTSYSGVWGQGTMVTVSSASTKGPSVFPLAPSSKSTSGGTAALGCLVKDYFPEPVTVSWNSGALTSGVHTFPAVLQSSGLYSLSSVVTVPSSSLGTQTYICNVNHKPSNTKVDKKVEPKSC

SEQ ID NO: 125 - protein, 220 aa, Artificial Sequence
  Synthetic Polypeptide
EIVMTQSPDSLAVSLGERATINCKSSQSVLYSSNNKNYLAWYHQKPGQSPKLLISWASTRESGVPDRFSGSGSGTDFTLTINSLQAEDVAVYYCQQYYSIPITFGGGTKVEIKRTVAAPSVFIFPPSDEQLKSGTASVVCLLNNFYPREAKVQWKVDNALQSGNSQESVTEQDSKDSTYSLSSTLTLSKADYEKHKVYACEVTHQGLSSPVTKSFNRGEC

SEQ ID NO: 126 - protein, 478 aa, Artificial Sequence
  Synthetic Polypeptide
EVQLVESGGGLVKPGGSLRLSCAASGFTFSNARMGWVRQAPGKGLEWVGRIKSKTEGGTRDYAAPVKGRFTISRDDSKNTLYLQMNSLKTEDTAVYYCTSYSGVWGQGTMVTVSSASTKGPSVFPLAPSSKSTSGGTAALGCLVKDYFPEPVTVSWNSGALTSGVHTFPAVLQSSGLYSLSSVVTVPSSSLGTQTYICNVNHKPSNTKVDKKVEPKSCGGGGQGGGGQGGGGQGGGGQGGGGQGGGGQGGGGQGGGGQEIVMTQSPDSLAVSLGERATINCKSSQSVLYSSNNKNYLAWYHQKPGQSPKLLISWASTRESGVPDRFSGSGSGTDFTLTINSLQAEDVAVYYCQQYYSIPITFGGGTKVEIKRTVAAPSVFIFPPSDEQLKSGTASVVCLLNNFYPREAKVQWKVDNALQSGNSQESVTEQDSKDSTYSLSSTLTLSKADYEKHKVYACEVTHQGLSSPVTKSFNRGEC

SEQ ID NO: 127 - protein, 733 aa, Artificial Sequence
  Synthetic Polypeptide
EVQLVESGGGLVKPGGSLRLSCAASGFTFSNARMGWVRQAPGKGLEWVGRIKSKTEGGTRDYAAPVKGRFTISRDDSKNTLYLQMNSLKTEDTAVYYCTSYSGVWGQGTMVTVSSASTKGPSVFPLAPSSKSTSGGTAALGCLVKDYFPEPVTVSWNSGALTSGVHTFPAVLQSSGLYSLSSVVTVPSSSLGTQTYICNVNHKPSNTKVDKKVEPKSCGGGGQGGGGQGGGGQGGGGQGGGGQGGGGQGGGGQGGGGQEIVMTQSPDSLAVSLGERATINCKSSQSVLYSSNNKNYLAWYHQKPGQSPKLLISWASTRESGVPDRFSGSGSGTDFTLTINSLQAEDVAVYYCQQYYSIPITFGGGTKVEIKRTVAAPSVFIFPPSDEQLKSGTASVVCLLNNFYPREAKVQWKVDNALQSGNSQESVTEQDSKDSTYSLSSTLTLSKADYEKHKVYACEVTHQGLSSPVTKSFNRGECSGGGGQEVQLVESGGGLVQPGGSLKLSCAASGFTFNKYAINWVRQAPGKGLEWVARIRSKYNNYATYYADAVKDRFTISRDDSKNTVYLQMNNLKTEDTAVYYCARAGNFGSSYISYWAYWGQGTLVTVSSGGGGQGGGGQGGGGQQTVVTQEPSLTVSPGGTVTITCGSSTGAVTSGNYPNWVQKKPGQAPRGLIGGTKFLAPGTPARFSGSLSGGKAALTLSGVQPEDEAEYYCVLWYSNRWVFGSGTKLTVL

SEQ ID NO: 128 - protein, 1211 aa, Artificial Sequence
  Synthetic Polypeptide
EVQLVESGGGLVKPGGSLRLSCAASGFTFSNARMGWVRQAPGKGLEWVGRIKSKTEGGTRDYAAPVKGRFTISRDDSKNTLYLQMNSLKTEDTAVYYCTSYSGVWGQGTMVTVSSASTKGPSVFPLAPSSKSTSGGTAALGCLVKDYFPEPVTVSWNSGALTSGVHTFPAVLQSSGLYSLSSVVTVPSSSLGTQTYICNVNHKPSNTKVDKKVEPKSCGGGGQGGGGQGGGGQGGGGQGGGGQGGGGQGGGGQGGGGQEIVMTQSPDSLAVSLGERATINCKSSQSVLYSSNNKNYLAWYHQKPGQSPKLLISWASTRESGVPDRFSGSGSGTDFTLTINSLQAEDVAVYYCQQYYSIPITFGGGTKVEIKRTVAAPSVFIFPPSDEQLKSGTASVVCLLNNFYPREAKVQWKVDNALQSGNSQESVTEQDSKDSTYSLSSTLTLSKADYEKHKVYACEVTHQGLSSPVTKSFNRGECSGGGGQEVQLVESGGGLVQPGGSLKLSCAASGFTFNKYAINWVRQAPGKGLEWVARIRSKYNNYATYYADAVKDRFTISRDDSKNTVYLQMNNLKTEDTAVYYCARAGNFGSSYISYWAYWGQGTLVTVSSGGGGQGGGGQGGGGQQTVVTQEPSLTVSPGGTVTITCGSSTGAVTSGNYPNWVQKKPGQAPRGLIGGTKFLAPGTPARFSGSLSGGKAALTLSGVQPEDEAEYYCVLWYSNRWVFGSGTKLTVLGGGGCPPCPAPELLGGPSVFLFPPKPKDTLMISRTPEVTCVVVDVSHEEPEVKFNWYVDGVEVHNAKTKPCEEQYGSTYRCVSVLTVLHQDWLNGKEYKCKVSNKALPAPIEKTISKAKGQPREPQVYTLPPSREEMTKNQVSLTCLVKGFYPSDIAVEWESNGQPENNYKTTPPVLDSDGSFFLYSKLTVDKSRWQQGNVFSCSVMHEALHNHYTQKSLSLSPGKGGGGQGGGGQGGGGQGGGGQGGGGQGGGGQCPPCPAPELLGGPSVFLFPPKPKDTLMISRTPEVTCVVVDVSHEEPEVKFNWYVDGVEVHNAKTKPCEEQYGSTYRCVSVLTVLHQDWLNGKEYKCKVSNKALPAPIEKTISKAKGQPREPQVYTLPPSREEMTKNQVSLTCLVKGFYPSDIAVEWESNGQPENNYKTTPPVLDSDGSFFLYSKLTVDKSRWQQGNVFSCSVMHEALHNHYTQKSLSLSPGK

SEQ ID NO: 129 - protein, 355 aa, Artificial Sequence
  Synthetic Polypeptide
MDYTLDPSMTTMTDYYYPDSLSSPCDGELIQRNDKLLLAVFYCLLFVFSLLGNSLVILVLVVCKKLRNITDIYLLNLALSDLLFVFSFPFQTYYQLDQWVFGTVMCKVVSGFYYIGFYSSMFFITLMSVDRYLAVVHAVYAIKVRTIRMGTTLSLVVWLTAIMATIPLLVFYQVASEDGVLQCYSFYNQQTLKWKIFTNFEMNILGLLIPFTIFMFCYIKILHQLKRCQNHNKTKAIRLVLIVVIASLLFWVPFNVVLFLTSLHSMHILDGCSISQQLNYATHVTEIISFTHCCVNPVIYAFVGEKFKKHLSEIFQKSCSHIFIYLGRQMPRESCEKSSSCQQHSFRSSSIDYIL

SEQ ID NO: 130 - protein, 355 aa, Artificial Sequence
  Synthetic Polypeptide
MDYRLDPSMTTMTDYYYPDSLSSPCDGELIQRNDKLLLAVFYCLLFVFSLLGNSLVILVLVVCKKLRNITDIYLLNLALSDLLFVFSFPFQTYYQLDQWVFGTVMCKVVSGFYYIGFYSSMFFITLMSVDRYLAVVHAVYAIKVRTIRMGTTLSLVVWLTAIMATIPLLVFYQVASEDGVLQCYSFYNQQTLKWKIFTNFEMNILGLLIPFTIFMFCYIKILHQLKRCQNHNKTKAIRLVLIVVIASLLFWVPFNVVLFLTSLHSMHILDGCSISQQLNYATHVTEIISFTHCCVNPVIYAFVGEKFKKHLSEIFQKSCSHIFIYLGRQMPRESCEKSSSCQQHSFRSSSIDYIL

SEQ ID NO: 131 - protein, 355 aa, Artificial Sequence
  Synthetic Polypeptide
MDYTLDLSVTTVTDYYYPDIFSSPCDAELIQTNGKLLLAVFYCLLFVFSLLGNSLVILVLVVCKKLRSITDVYLLNLALSDLLFVFSFPFQTYYLLDQWVFGTVMCKVVSGFYYIGFYSSMFFITLMSVDRYLAVVHAVYALKVRTIRMGTTLCLAVWLTAIMATIPLLVFYQVASEDGVLQCYSFYNQQTLKWKIFTNFKMNILGLLIPFTIFMFCYIKILHQLKRCQNHNKTKAIRLVLIVVIASLLFWVPFNVVLFLTSLHSMHILDGCSISQQLTYATHVTEIISFTHCCVNPVIYAFVGEKFKKHLSEIFQKSCSQIFNYLGRQMPRESCEKSSSCQQHSSRSSSVDYIL

SEQ ID NO: 132 - protein, 355 aa, Artificial Sequence [sequence omitted]

SEQ ID NO: 133 - protein, 35 aa, Artificial Sequence
  Synthetic Polypeptide
MDYTLDLSVTTVTDYYYPDIFSSPCDAELIQTNGK

SEQ ID NO: 134 - protein, 12 aa, Artificial Sequence
  Synthetic Polypeptide
MDYTLDLSVTTV

SEQ ID NO: 135 - protein, 12 aa, Artificial Sequence
  Synthetic Polypeptide
TDYYYPDIFSSP

SEQ ID NO: 136 - protein, 11 aa, Artificial Sequence
  Synthetic Polypeptide
CDAELIQTNGK

SEQ ID NO: 137 - protein, 12 aa, Artificial Sequence
  Synthetic Polypeptide
LSVTTVTDYYYP

SEQ ID NO: 138 - protein, 12 aa, Artificial Sequence
  Synthetic Polypeptide
DIFSSPCDAELI

SEQ ID NO: 139 - protein, 11 aa, Artificial Sequence
  Synthetic Polypeptide
RASQGISNWLA

SEQ ID NO: 140 - protein, 7 aa, Artificial Sequence
  Synthetic Polypeptide
AASSLQS

SEQ ID NO: 141 - protein, 9 aa, Artificial Sequence
  Synthetic Polypeptide
QQAESFPHT

SEQ ID NO: 142 - protein, 5 aa, Artificial Sequence
  Synthetic Polypeptide
SYDMS

SEQ ID NO: 143 - protein, 17 aa, Artificial Sequence
  Synthetic Polypeptide
LISGGGSQTYYAESVKG

SEQ ID NO: 144 - protein, 11 aa, Artificial Sequence
  Synthetic Polypeptide
PSGHYFYAMDV

SEQ ID NO: 145 - protein, 107 aa, Artificial Sequence
  Synthetic Polypeptide
DIQMTQSPSSVSASVGDRVTITCRASQGISNWLAWYQQKPGKAPKLLIFAASSLQSGVPSRFSGSGSGTDFTLTISSLQPEDFATYYCQQAESFPHTFGGGTKVEIK

SEQ ID NO: 146 - protein, 120 aa, Artificial Sequence
  Synthetic Polypeptide
EVQLLESGGGLVQPGGSLRLSCAASGFTFSSYDMSWVRQAPGKGLEWVSLISGGGSQTYYAESVKGRFTISRDNSKNTLYLQMNSLRAEDTAVYFCASPSGHYFYAMDVWGQGTTVTVSS

SEQ ID NO: 147 - protein, 214 aa, Artificial Sequence
  Synthetic Polypeptide
DIQMTQSPSSVSASVGDRVTITCRASQGISNWLAWYQQKPGKAPKLLIFAASSLQSGVPSRFSGSGSGTDFTLTISSLQPEDFATYYCQQAESFPHTFGGGTKVEIKRTVAAPSVFIFPPSDEQLKSGTASVVCLLNNFYPREAKVQWKVDNALQSGNSQESVTEQDSKDSTYSLSSTLTLSKADYEKHKVYACEVTHQGLSSPVTKSFNRGEC

SEQ ID NO: 148 - protein, 214 aa, Artificial Sequence; identical to SEQ ID NO: 147
  Synthetic Polypeptide

SEQ ID NO: 149 - protein, 11 aa, Artificial Sequence
  Synthetic Polypeptide
SGDKLGDKYAS

SEQ ID NO: 150 - protein, 7 aa, Artificial Sequence
  Synthetic Polypeptide
QDRKRPS

SEQ ID NO: 151 - protein, 9 aa, Artificial Sequence
  Synthetic Polypeptide
QAFESSTEV

SEQ ID NO: 152 - protein, 5 aa, Artificial Sequence
  Synthetic Polypeptide
NYGMH

SEQ ID NO: 153 - protein, 17 aa, Artificial Sequence
  Synthetic Polypeptide
LIWYDASKKYYAESVKG

SEQ ID NO: 154 - protein, 16 aa, Artificial Sequence
  Synthetic Polypeptide
DPSSLTGSTGYYGMDV

SEQ ID NO: 155 - protein, 106 aa, Artificial Sequence
  Synthetic Polypeptide
SYELTQPPSVSVSPGQTASITCSGDKLGDKYASWYQQKPGQSPVLVIYQDRKRPSGIPERFSGSNSGNTATLTISGTQAMDEADYYCQAFESSTEVFGGGTKLTVL

SEQ ID NO: 156 - protein, 106 aa, Artificial Sequence; identical to SEQ ID NO: 155
  Synthetic Polypeptide

SEQ ID NO: 157 - protein, 212 aa, Artificial Sequence
  Synthetic Polypeptide
SYELTQPPSVSVSPGQTASITCSGDKLGDKYASWYQQKPGQSPVLVIYQDRKRPSGIPERFSGSNSGNTATLTISGTQAMDEADYYCQAFESSTEVFGGGTKLTVLGQPKAAPSVTLFPPSSEELQANKATLVCLISDFYPGAVTVAWKADSSPVKAGVETTTPSKQSNNKYAASSYLSLTPEQWKSHRSYSCQVTHEGSTVEKTVAPTECS

SEQ ID NO: 158 - protein, 455 aa, Artificial Sequence
  Synthetic Polypeptide
QVQLVESGGGVVQPGRSLRLSCAASGFTFSNYGMHWVRQAPGKGLEWVALIWYDASKKYYAESVKGRFTISRDNSKNTLYLQMNSLRAEDTAAYYCARDPSSLTGSTGYYGMDVWGQGTTVTVSSASTKGPSVFPLAPSSKSTSGGTAALGCLVKDYFPEPVTVSWNSGALTSGVHTFPAVLQSSGLYSLSSVVTVPSSSLGTQTYICNVNHKPSNTKVDKKVEPKSCDKTHTCPPCPAPELLGGPSVFLFPPKPKDTLMISRTPEVTCVVVDVSHEDPEVKFNWYVDGVEVHNAKTKPCEEQYGSTYRCVSVLTVLHQDWLNGKEYKCKVSNKALPAPIEKTISKAKGQPREPQVYTLPPSREEMTKNQVSLTCLVKGFYPSDIAVEWESNGQPENNYKTTPPVLDSDGSFFLYSKLTVDKSRWQQGNVFSCSVMHEALHNHYTQKSLSLSPGK

SEQ ID NO: 159 - protein, 11 aa, Artificial Sequence
  Synthetic Polypeptide
SGDALPKKYAY

SEQ ID NO: 160 - protein, 7 aa, Artificial Sequence
  Synthetic Polypeptide
EDAKRPS

SEQ ID NO: 161 - protein, 11 aa, Artificial Sequence
  Synthetic Polypeptide
YSTDASGNHRV

SEQ ID NO: 162 - protein, 5 aa, Artificial Sequence
  Synthetic Polypeptide
DYSMS

SEQ ID NO: 163 - protein, 17 aa, Artificial Sequence
  Synthetic Polypeptide
GINWNGGRTRYADAVKG

SEQ ID NO: 164 - protein, 12 aa, Artificial Sequence
  Synthetic Polypeptide
EFNNFESNWFDP

SEQ ID NO: 165 - protein, 108 aa, Artificial Sequence
  Synthetic Polypeptide
SYELTQPPSVSVSPGQTARITCSGDALPKKYAYWYQQKPGQAPVLVISEDAKRPSGIPERFSGSSSGTMATLTISGAQVEDEADYYCYSTDASGNHRVFGGGTKLTVL

SEQ ID NO: 166 - protein, 121 aa, Artificial Sequence
  Synthetic Polypeptide
EVQLVESGGSVVRPGGSLRLSCAASGFTVDDYSMSWVRQVPGKGLEWVSGINWNGGRTRYADAVKGRFTISRDSAKNSLYLQMNSLRAEDTALYYCAREFNNFESNWFDPWGQGTLVTVSS

SEQ ID NO: 167 - protein, 214 aa, Artificial Sequence
  Synthetic Polypeptide
SYELTQPPSVSVSPGQTARITCSGDALPKKYAYWYQQKPGQAPVLVISEDAKRPSGIPERFSGSSSGTMATLTISGAQVEDEADYYCYSTDASGNHRVFGGGTKLTVLGQPKAAPSVTLFPPSSEELQANKATLVCLISDFYPGAVTVAWKADSSPVKAGVETTTPSKQSNNKYAASSYLSLTPEQWKSHRSYSCQVTHEGSTVEKTVAPTECS

SEQ ID NO: 168 - protein, 451 aa, Artificial Sequence
  Synthetic Polypeptide
EVQLVESGGSVVRPGGSLRLSCAASGFTVDDYSMSWVRQVPGKGLEWVSGINWNGGRTRYADAVKGRFTISRDSAKNSLYLQMNSLRAEDTALYYCAREFNNFESNWFDPWGQGTLVTVSSASTKGPSVFPLAPSSKSTSGGTAALGCLVKDYFPEPVTVSWNSGALTSGVHTFPAVLQSSGLYSLSSVVTVPSSSLGTQTYICNVNHKPSNTKVDKKVEPKSCDKTHTCPPCPAPELLGGPSVFLFPPKPKDTLMISRTPEVTCVVVDVSHEDPEVKFNWYVDGVEVHNAKTKPCEEQYGSTYRCVSVLTVLHQDWLNGKEYKCKVSNKALPAPIEKTISKAKGQPREPQVYTLPPSREEMTKNQVSLTCLVKGFYPSDIAVEWESNGQPENNYKTTPPVLDSDGSFFLYSKLTVDKSRWQQGNVFSCSVMHEALHNHYTQKSLSLSPGK

SEQ ID NO: 169 - protein, 11 aa, Artificial Sequence
  Synthetic Polypeptide
SGDALPKKYAY

SEQ ID NO: 170 - protein, 7 aa, Artificial Sequence
  Synthetic Polypeptide
EDAKRPS

SEQ ID NO: 171 - protein, 11 aa, Artificial Sequence
  Synthetic Polypeptide
YSTDASGNHRV

SEQ ID NO: 172 - protein, 5 aa, Artificial Sequence
  Synthetic Polypeptide
DYSMS

SEQ ID NO: 173 - protein, 17 aa, Artificial Sequence
  Synthetic Polypeptide
GINWNAGRTRYADAVKG

SEQ ID NO: 174 - protein, 12 aa, Artificial Sequence
  Synthetic Polypeptide
EFNNFESNWFDP

SEQ ID NO: 175 - protein, 108 aa, Artificial Sequence; identical to SEQ ID NO: 165
  Synthetic Polypeptide

SEQ ID NO: 176 - protein, 121 aa, Artificial Sequence
  Synthetic Polypeptide
EVQLVESGGSVVRPGGSLRLSCAASGFTVDDYSMSWVRQVPGKGLEWVSGINWNAGRTRYADAVKGRFTISRDSAKNSLYLQMNSLRAEDTALYYCAREFNNFESNWFDPWGQGTLVTVSS

SEQ ID NO: 177 - protein, 214 aa, Artificial Sequence; identical to SEQ ID NO: 167
  Synthetic Polypeptide

SEQ ID NO: 178 - protein, 451 aa, Artificial Sequence
  Synthetic Polypeptide
EVQLVESGGSVVRPGGSLRLSCAASGFTVDDYSMSWVRQVPGKGLEWVSGINWNAGRTRYADAVKGRFTISRDSAKNSLYLQMNSLRAEDTALYYCAREFNNFESNWFDPWGQGTLVTVSSASTKGPSVFPLAPSSKSTSGGTAALGCLVKDYFPEPVTVSWNSGALTSGVHTFPAVLQSSGLYSLSSVVTVPSSSLGTQTYICNVNHKPSNTKVDKKVEPKSCDKTHTCPPCPAPELLGGPSVFLFPPKPKDTLMISRTPEVTCVVVDVSHEDPEVKFNWYVDGVEVHNAKTKPCEEQYGSTYRCVSVLTVLHQDWLNGKEYKCKVSNKALPAPIEKTISKAKGQPREPQVYTLPPSREEMTKNQVSLTCLVKGFYPSDIAVEWESNGQPENNYKTTPPVLDSDGSFFLYSKLTVDKSRWQQGNVFSCSVMHEALHNHYTQKSLSLSPGK

SEQ ID NO: 179 - protein, 11 aa, Artificial Sequence
  Synthetic Polypeptide
RASQGISNWLA

SEQ ID NO: 180 - protein, 7 aa, Artificial Sequence
  Synthetic Polypeptide
AASSLQS

SEQ ID NO: 181 - protein, 9 aa, Artificial Sequence
  Synthetic Polypeptide
QQAESFPHT

SEQ ID NO: 182 - protein, 5 aa, Artificial Sequence
  Synthetic Polypeptide
SYDMS

SEQ ID NO: 183 - protein, 17 aa, Artificial Sequence
  Synthetic Polypeptide
LISGGGSNTYYAESVKG

SEQ ID NO: 184 - protein, 11 aa, Artificial Sequence
  Synthetic Polypeptide
PSGHYFYAMDV

SEQ ID NO: 185 - protein, 107 aa, Artificial Sequence; identical to SEQ ID NO: 145
  Synthetic Polypeptide

SEQ ID NO: 186 - protein, 120 aa, Artificial Sequence
  Synthetic Polypeptide
EVQLLESGGGLVQPGGSLRLSCAASGFTFSSYDMSWVRQAPGKGLEWVSLISGGGSNTYYAESVKGRFTISRDNSKNTLYLQMNSLRAEDTAVYFCASPSGHYFYAMDVWGQGTTVTVSS

SEQ ID NO: 187 - protein, 214 aa, Artificial Sequence; identical to SEQ ID NO: 147
  Synthetic Polypeptide

SEQ ID NO: 188 - protein, 450 aa, Artificial Sequence
  Synthetic Polypeptide
EVQLLESGGGLVQPGGSLRLSCAASGFTFSSYDMSWVRQAPGKGLEWVSLISGGGSNTYYAESVKGRFTISRDNSKNTLYLQMNSLRAEDTAVYFCASPSGHYFYAMDVWGQGTTVTVSSASTKGPSVFPLAPSSKSTSGGTAALGCLVKDYFPEPVTVSWNSGALTSGVHTFPAVLQSSGLYSLSSVVTVPSSSLGTQTYICNVNHKPSNTKVDKKVEPKSCDKTHTCPPCPAPELLGGPSVFLFPPKPKDTLMISRTPEVTCVVVDVSHEDPEVKFNWYVDGVEVHNAKTKPCEEQYGSTYRCVSVLTVLHQDWLNGKEYKCKVSNKALPAPIEKTISKAKGQPREPQVYTLPPSREEMTKNQVSLTCLVKGFYPSDIAVEWESNGQPENNYKTTPPVLDSDGSFFLYSKLTVDKSRWQQGNVFSCSVMHEALHNHYTQKSLSLSPGK

SEQ ID NO: 189 - protein, 5 aa, Artificial Sequence
  Synthetic Polypeptide
GGGGS

SEQ ID NO: 190 - protein, 20 aa, Artificial Sequence
  Synthetic Polypeptide
GGGGSGGGGSGGGGSGGGGS

SEQ ID NO: 191 - protein, 5 aa, Artificial Sequence
  Synthetic Polypeptide
KYAMN

SEQ ID NO: 192 - protein, 19 aa, Artificial Sequence
  Synthetic Polypeptide
RIRSKYNNYATYYADSVKD

SEQ ID NO: 193 - protein, 14 aa, Artificial Sequence
  Synthetic Polypeptide
HGNFGNSYISYWAY

SEQ ID NO: 194 - protein, 14 aa, Artificial Sequence
  Synthetic Polypeptide
GSSTGAVTSGNYPN

SEQ ID NO: 195 - protein, 7 aa, Artificial Sequence
  Synthetic Polypeptide
GTKFLAP

SEQ ID NO: 196 - protein, 9 aa, Artificial Sequence
  Synthetic Polypeptide
VLWYSNRWV

SEQ ID NO: 197 - protein, 125 aa, Artificial Sequence
  Synthetic Polypeptide
EVQLVESGGGLVQPGGSLKLSCAASGFTFNKYAMNWVRQAPGKGLEWVARIRSKYNNYATYYADSVKDRFTISRDDSKNTAYLQMNNLKTEDTAVYYCVRHGNFGNSYISYWAYWGQGTLVTVSS

SEQ ID NO: 198 - protein, 109 aa, Artificial Sequence
  Synthetic Polypeptide
QTVVTQEPSLTVSPGGTVTLTCGSSTGAVTSGNYPNWVQQKPGQAPRGLIGGTKFLAPGTPARFSGSLLGGKAALTLSGVQPEDEAEYYCVLWYSNRWVFGGGTKLTVL

SEQ ID NO: 199 - protein, 5 aa, Artificial Sequence
  Synthetic Polypeptide
KYAIN

SEQ ID NO: 200 - protein, 19 aa, Artificial Sequence
  Synthetic Polypeptide
RIRSKYNNYATYYADAVKD

SEQ ID NO: 201 - protein, 14 aa, Artificial Sequence
  Synthetic Polypeptide
AGNFGSSYISYWAY

SEQ ID NO: 202 - protein, 14 aa, Artificial Sequence
  Synthetic Polypeptide
GSSTGAVTSGNYPN

SEQ ID NO: 203 - protein, 7 aa, Artificial Sequence
  Synthetic Polypeptide
GTKFLAP

SEQ ID NO: 204 - protein, 9 aa, Artificial Sequence
  Synthetic Polypeptide
VLWYSNRWV

SEQ ID NO: 205 - protein, 125 aa, Artificial Sequence
  Synthetic Polypeptide
EVQLVESGGGLVQPGGSLKLSCAASGFTFNKYAINWVRQAPGKGLEWVARIRSKYNNYATYYADAVKDRFTISRDDSKNTVYLQMNNLKTEDTAVYYCARAGNFGSSYISYWAYWGQGTLVTVSS

SEQ ID NO: 206 - protein, 109 aa, Artificial Sequence
  Synthetic Polypeptide
QTVVTQEPSLTVSPGGTVTITCGSSTGAVTSGNYPNWVQKKPGQAPRGLIGGTKFLAPGTPARFSGSLSGGKAALTLSGVQPEDEAEYYCVLWYSNRWVFGSGTKLTVL

SEQ ID NO: 207 - protein, 5 aa, Artificial Sequence
  Synthetic Polypeptide
GGGGQ

SEQ ID NO: 208 - protein, 20 aa, Artificial Sequence
  Synthetic Polypeptide
GGGGQGGGGQGGGGQGGGGQ

SEQ ID NO: 209 - protein, 353 aa, Artificial Sequence
  Synthetic Polypeptide
MDYTMEPNVTMTDYYPDFFTAPCDAEFLLRGSMLYLAILYCVLFVLGLLGNSLVILVLVGCKKLRSITDIYLLNLAASDLLFVLSIPFQTHNLLDQWVFGTAMCKVVSGLYYIGFFSSMFFITLMSVDRYLAIVHAVYAIKVRTASVGTALSLTVWLAAVTATIPLMVFYQVASEDGMLQCFQFYEEQSLRWKLFTHFEINALGLLLPFAILLFCYVRILQQLRGCLNHNRTRAIKLVLTVVIVSLLFWVPFNVALFLTSLHDLHILDGCATRQRLALAIHVTEVISFTHCCVNPVIYAFIGEKFKKHLMDVFQKSCSHIFLYLGRQMPVGALERQLSSNQRSSHSSTLDDIL

SEQ ID NO: 210 - protein, 353 aa, Artificial Sequence
  Synthetic Polypeptide
MDYTLEPNVTMTDYYPDFFTTPCDTELLLRGGTLYLAVLYCILFVLGLLGNSLVILVLVACKKLRSITDVYLLNLAASDLLFVLSIPFQTHNLLDQWVFGTVMCKVVSGLYYIGFFSSMLFITLMSVDRYLAVVHPVHAIKVRTARVGTALSLAVWLAAIAATVPLMVFYQVSSEDGMLQCFQLYDEQSLRWKLFTHFEVNALGLLLPFAILLFCYVRILQQLRGCLNHNRTRAIKLVLTIVVVSLLFWVPFNVVLFLTSLHDMHILEGCATRQRLALATHVTEVISFMHCCVNPVIYAFIGEKFKKHLVDVFQKSCSHIFLYVGRQMPVGALERQLSSNQRSSHSSTLDYIL

SEQ ID NO: 211 - protein, 360 aa, Artificial Sequence
  Synthetic Polypeptide
MNPTDIADTTLDESIYSNYYLYESIPKPCTKEGIKAFGELFLPPLYSLVFVFGLLGNSVVVLVLFKYKRLRSMTDVYLLNLAISDLLFVFSLPFWGYYAADQWVFGLGLCKMISWMYLVGFYSGIFFVMLMSIDRYLAIVHAVFSLRARTLTYGVITSLATWSVAVFASLPGFLFSTCYTERNHTYCKTKYSLNSTTWKVLSSLEINILGLVIPLGIMLFCYSMIIRTLQHCKNEKKNKAVKMIFAVVVLFLGFWTPYNIVLFLETLVELEVLQDCTFERYLDYAIQATETLAFVHCCLNPIIYFFLGEKFRKYILQLFKTCRGLFVLCQYCGLLQIYSADTPSSSYTQSTMDHDLHDAL

SEQ ID NO: 212 - protein, 449 aa, Artificial Sequence
  Synthetic Polypeptide
EVQLLESGGGLVQPGGSLRLSCAASGFTFSSYDMSWVRQAPGKGLEWVSLISGGGSQTYYAESVKGRFTISRDNSKNTLYLQMNSLRAEDTAVYFCASPSGHYFYAMDVWGQGTTVTVSSASTKGPSVFPLAPSSKSTSGGTAALGCLVKDYFPEPVTVSWNSGALTSGVHTFPAVLQSSGLYSLSSVVTVPSSSLGTQTYICNVNHKPSNTKVDKKVEPKSCDKTHTCPPCPAPELLGGPSVFLFPPKPKDTLMISRTPEVTCVVVDVSHEDPEVKFNWYVDGVEVHNAKTKPCEEQYGSTYRCVSVLTVLHQDWLNGKEYKCKVSNKALPAPIEKTISKAKGQPREPQVYTLPPSREEMTKNQVSLTCLVKGFYPSDIAVEWESNGQPENNYKTTPPVLDSDGSFFLYSKLTVDKSRWQQGNVFSCSVMHEALHNHYTQKSLSLSPG

SEQ ID NO: 213 - protein, 22 aa, Artificial Sequence
  Synthetic Polypeptide
MDMRVPAQLLGLLLLWLRGARC

SEQ ID NO: 214 - DNA, 66 bp, Artificial Sequence
  Synthetic Polynucleotide
atggacatgagagtgcctgcacagctgctgggcctgctgctgctgtggctgagaggcgccagatgc

SEQ ID NO: 215 - protein, 19 aa, Artificial Sequence
  Synthetic Polypeptide
MAWALLLLTLLTQGTGSWA

SEQ ID NO: 216 - DNA, 57 bp, Artificial Sequence
  Synthetic Polynucleotide
atggcctgggctctgctgctcctcaccctcctcactcagggcacagggtcctgggcc

SEQ ID NO: 217 - protein, 5 aa, Artificial Sequence
  Synthetic Polypeptide
NARMG

SEQ ID NO: 218 - protein, 19 aa, Artificial Sequence
  Synthetic Polypeptide
RIKSKTEGGTRDYAAPVKG

SEQ ID NO: 219 - protein, 4 aa, Artificial Sequence
  Synthetic Polypeptide
YSGV

SEQ ID NO: 220 - protein, 17 aa, Artificial Sequence
  Synthetic Polypeptide
KSSQSVLYSSNNKNYLA

SEQ ID NO: 221 - protein, 7 aa, Artificial Sequence
  Synthetic Polypeptide
WASTRES

SEQ ID NO: 222 - protein, 9 aa, Artificial Sequence
  Synthetic Polypeptide
QQYYSIPIT

SEQ ID NO: 223 - protein, 115 aa, Artificial Sequence; identical to SEQ ID NO: 119
  Synthetic Polypeptide

SEQ ID NO: 224 - protein, 113 aa, Artificial Sequence; identical to SEQ ID NO: 120
  Synthetic Polypeptide

SEQ ID NO: 225 - protein, 243 aa, Artificial Sequence; identical to SEQ ID NO: 121
  Synthetic Polypeptide

SEQ ID NO: 226 - protein, 498 aa, Artificial Sequence; identical to SEQ ID NO: 122
  Synthetic Polypeptide

SEQ ID NO: 227 - protein, 974 aa, Artificial Sequence
  Synthetic Polypeptide
EVQLVESGGGLVKPGGSLRLSCAASGFTFSNARMGWVRQAPGKCLEWVGRIKSKTEGGTRDYAAPVKGRFTISRDDSKNTLYLQMNSLKTEDTAVYYCTSYSGVWGQGTMVTVSSGGGGQGGGGQGGGGQEIVMTQSPDSLAVSLGERATINCKSSQSVLYSSNNKNYLAWYHQKPGQSPKLLISWASTRESGVPDRFSGSGSGTDFTLTINSLQAEDVAVYYCQQYYSIPITFGCGTKVEIKSGGGGQEVQLVESGGGLVQPGGSLKLSCAASGFTFNKYAINWVRQAPGKGLEWVARIRSKYNNYATYYADAVKDRFTISRDDSKNTVYLQMNNLKTEDTAVYYCARAGNFGSSYISYWAYWGQGTLVTVSSGGGGQGGGGQGGGGQQTVVTQEPSLTVSPGGTVTITCGSSTGAVTSGNYPNWVQKKPGQAPRGLIGGTKFLAPGTPARFSGSLSGGKAALTLSGVQPEDEAEYYCVLWYSNRWVFGSGTKLTVLGGGGCPPCPAPELLGGPSVFLFPPKPKDTLMISRTPEVTCVVVDVSHEEPEVKFNWYVDGVEVHNAKTKPCEEQYGSTYRCVSVLTVLHQDWLNGKEYKCKVSNKALPAPIEKTISKAKGQPREPQVYTLPPSREEMTKNQVSLTCLVKGFYPSDIAVEWESNGQPENNYKTTPPVLDSDGSFFLYSKLTVDKSRWQQGNVFSCSVMHEALHNHYTQKSLSLSPGGGGQGGGGQGGGGQGGGGQGGGGQGGGGQCPPCPAPELLGGPSVFLFPPKPKDTLMISRTPEVTCVVVDVSHEEPEVKFNWYVDGVEVHNAKTKPCEEQYGSTYRCVSVLTVLHQDWLNGKEYKCKVSNKALPAPIEKTISKAKGQPREPQVYTLPPSREEMTKNQVSLTCLVKGFYPSDIAVEWESNGQPENNYKTTPPVLDSDGSFFLYSKLTVDKSRWQQGNVFSCSVMHEALHNHYTQKSLSLSPGK

SEQ ID NO: 228 - protein, 5 aa, Artificial Sequence
  Synthetic Polypeptide
NARMG

SEQ ID NO: 229 - protein, 19 aa, Artificial Sequence
  Synthetic Polypeptide
RIKSKTEGGTRDYAAPVKG

SEQ ID NO: 230 - protein, 4 aa, Artificial Sequence
  Synthetic Polypeptide
YSGV

SEQ ID NO: 231 - protein, 17 aa, Artificial Sequence
  Synthetic Polypeptide
KSSQSVLYSSNNKNYLA

SEQ ID NO: 232 - protein, 7 aa, Artificial Sequence
  Synthetic Polypeptide
WASTRES

SEQ ID NO: 233 - protein, 9 aa, Artificial Sequence
  Synthetic Polypeptide
QQYYSIPIT

SEQ ID NO: 234 - protein, 115 aa, Artificial Sequence; identical to SEQ ID NO: 119
  Synthetic Polypeptide

SEQ ID NO: 235 - protein, 113 aa, Artificial Sequence; identical to SEQ ID NO: 120
  Synthetic Polypeptide

SEQ ID NO: 236 - protein, 243 aa, Artificial Sequence; identical to SEQ ID NO: 121
  Synthetic Polypeptide

SEQ ID NO: 237 - protein, 498 aa, Artificial Sequence; identical to SEQ ID NO: 122
  Synthetic Polypeptide

SEQ ID NO: 238 - protein, 974 aa, Artificial Sequence
  Synthetic Polypeptide
EVQLVESGGGLVKPGGSLRLSCAASGFTFSNARMGWVRQAPGKCLEWVGRIKSKTEGGTRDYAAPVKGRFTISRDDSKNTLYLQMNSLKTEDTAVYYCTSYSGVWGQGTMVTVSSGGGGQGGGGQGGGGQEIVMTQSPDSLAVSLGERATINCKSSQSVLYSSNNKNYLAWYHQKPGQSPKLLISWASTRESGVPDRFSGSGSGTDFTLTINSLQAEDVAVYYCQQYYSIPITFGCGTKVEIKSGGGGQEVQLVESGGGLVQPGGSLKLSCAASGFTFNKYAINWVRQAPGKGLEWVARIRSKYNNYATYYADAVKDRFTISRDDSKNTVYLQMNNLKTEDTAVYYCARAGNFGSSYISYWAYWGQGTLVTVSSGGGGQGGGGQGGGGQQTVVTQEPSLTVSPGGTVTITCGSSTGAVTSGNYPNWVQKKPGQAPRGLIGGTKFLAPGTPARFSGSLSGGKAALTLSGVQPEDEAEYYCVLWYSNRWVFGSGTKLTVLGGGGCPPCPAPELLGGPSVFLFPPKPKDTLYITREPEVTCVVVDVSHEEPEVKFNWYVDGVEVHNAKTKPCEEQYGSTYRCVSVLTVLHQDWLNGKEYKCKVSNKALPAPIEKTISKAKGQPREPQVYTLPPSREEMTKNQVSLTCLVKGFYPSDIAVEWESNGQPENNYKTTPPVLDSDGSFFLYSKLTVDKSRWQQGNVFSCSVMHEALHNHYTQKSLSLSPGGGGQGGGGQGGGGQGGGGQGGGGQGGGGQCPPCPAPELLGGPSVFLFPPKPKDTLYITREPEVTCVVVDVSHEEPEVKFNWYVDGVEVHNAKTKPCEEQYGSTYRCVSVLTVLHQDWLNGKEYKCKVSNKALPAPIEKTISKAKGQPREPQVYTLPPSREEMTKNQVSLTCLVKGFYPSDIAVEWESNGQPENNYKTTPPVLDSDGSFFLYSKLTVDKSRWQQGNVFSCSVMHEALHNHYTQKSLSLSPGK

SEQ ID NO: 239 - protein, 5 aa, Artificial Sequence
  Synthetic Polypeptide
NARMG

SEQ ID NO: 240 - protein, 19 aa, Artificial Sequence
  Synthetic Polypeptide
RIKSKTEGGTRDYAAPVKG

SEQ ID NO: 241 - protein, 4 aa, Artificial Sequence
  Synthetic Polypeptide
YSGV

SEQ ID NO: 242 - protein, 17 aa, Artificial Sequence
  Synthetic Polypeptide
KSSQSVLYSSNNKNYLA

SEQ ID NO: 243 - protein, 7 aa, Artificial Sequence
  Synthetic Polypeptide
WASTRES

SEQ ID NO: 244 - protein, 9 aa, Artificial Sequence
  Synthetic Polypeptide
QQYYSIPIT

SEQ ID NO: 245 - protein, 218 aa, Artificial Sequence; identical to SEQ ID NO: 124
  Synthetic Polypeptide

SEQ ID NO: 246 - protein, 220 aa, Artificial Sequence; identical to SEQ ID NO: 125
  Synthetic Polypeptide

SEQ ID NO: 247 - protein, 478 aa, Artificial Sequence; identical to SEQ ID NO: 126
  Synthetic Polypeptide

SEQ ID NO: 248 - protein, 733 aa, Artificial Sequence; identical to SEQ ID NO: 127
  Synthetic Polypeptide

SEQ ID NO: 249 - protein, 1209 aa, Artificial Sequence
  Synthetic Polypeptide
EVQLVESGGGLVKPGGSLRLSCAASGFTFSNARMGWVRQAPGKGLEWVGRIKSKTEGGTRDYAAPVKGRFTISRDDSKNTLYLQMNSLKTEDTAVYYCTSYSGVWGQGTMVTVSSASTKGPSVFPLAPSSKSTSGGTAALGCLVKDYFPEPVTVSWNSGALTSGVHTFPAVLQSSGLYSLSSVVTVPSSSLGTQTYICNVNHKPSNTKVDKKVEPKSCGGGGQGGGGQGGGGQGGGGQGGGGQGGGGQGGGGQGGGGQEIVMTQSPDSLAVSLGERATINCKSSQSVLYSSNNKNYLAWYHQKPGQSPKLLISWASTRESGVPDRFSGSGSGTDFTLTINSLQAEDVAVYYCQQYYSIPITFGGGTKVEIKRTVAAPSVFIFPPSDEQLKSGTASVVCLLNNFYPREAKVQWKVDNALQSGNSQESVTEQDSKDSTYSLSSTLTLSKADYEKHKVYACEVTHQGLSSPVTKSFNRGECSGGGGQEVQLVESGGGLVQPGGSLKLSCAASGFTFNKYAINWVRQAPGKGLEWVARIRSKYNNYATYYADAVKDRFTISRDDSKNTVYLQMNNLKTEDTAVYYCARAGNFGSSYISYWAYWGQGTLVTVSSGGGGQGGGGQGGGGQQTVVTQEPSLTVSPGGTVTITCGSSTGAVTSGNYPNWVQKKPGQAPRGLIGGTKFLAPGTPARFSGSLSGGKAALTLSGVQPEDEAEYYCVLWYSNRWVFGSGTKLTVLGGGGCPPCPAPELLGGPSVFLFPPKPKDTLYITREPEVTCVVVDVSHEEPEVKFNWYVDGVEVHNAKTKPCEEQYGSTYRCVSVLTVLHQDWLNGKEYKCKVSNKALPAPIEKTISKAKGQPREPQVYTLPPSREEMTKNQVSLTCLVKGFYPSDIAVEWESNGQPENNYKTTPPVLDSDGSFFLYSKLTVDKSRWQQGNVFSCSVMHEALHNHYTQKSLSLSPGGGGQGGGGQGGGGQGGGGQGGGGQGGGGQCPPCPAPELLGGPSVFLFPPKPKDTLYITREPEVTCVVVDVSHEEPEVKFNWYVDGVEVHNAKTKPCEEQYGSTYRCVSVLTVLHQDWLNGKEYKCKVSNKALPAPIEKTISKAKGQPREPQVYTLPPSREEMTKNQVSLTCLVKGFYPSDIAVEWESNGQPENNYKTTPPVLDSDGSFFLYSKLTVDKSRWQQGNVFSCSVMHEALHNHYTQKSLSLSPGK

SEQ ID NO: 250 - protein, 5 aa, Artificial Sequence
  Synthetic Polypeptide
NARMG

SEQ ID NO: 251 - protein, 19 aa, Artificial Sequence
  Synthetic Polypeptide
RIKSKTEGGTRDYAAPVKG

SEQ ID NO: 252 - protein, 4 aa, Artificial Sequence
  Synthetic Polypeptide
YSGV

SEQ ID NO: 253 - protein, 17 aa, Artificial Sequence
  Synthetic Polypeptide
KSSQSVLYSSNNKNYLA

SEQ ID NO: 254 - protein, 7 aa, Artificial Sequence
  Synthetic Polypeptide
WASTRES

SEQ ID NO: 255 - protein, 9 aa, Artificial Sequence
  Synthetic Polypeptide
QQYYSIPIT

SEQ ID NO: 256 - protein, 218 aa, Artificial Sequence; identical to SEQ ID NO: 124
  Synthetic Polypeptide

SEQ ID NO: 257 - protein, 220 aa, Artificial Sequence; identical to SEQ ID NO: 125
  Synthetic Polypeptide

SEQ ID NO: 258 - protein, 478 aa, Artificial Sequence; identical to SEQ ID NO: 126
  Synthetic Polypeptide

SEQ ID NO: 259 - protein, 733 aa, Artificial Sequence; identical to SEQ ID NO: 127
  Synthetic Polypeptide

SEQ ID NO: 260 - protein, 1209 aa, Artificial Sequence
  Synthetic Polypeptide
EVQLVESGGGLVKPGGSLRLSCAASGFTFSNARMGWVRQAPGKGLEWVGRIKSKTEGGTRDYAAPVKGRFTISRDDSKNTLYLQMNSLKTEDTAVYYCTSYSGVWGQGTMVTVSSASTKGPSVFPLAPSSKSTSGGTAALGCLVKDYFPEPVTVSWNSGALTSGVHTFPAVLQSSGLYSLSSVVTVPSSSLGTQTYICNVNHKPSNTKVDKKVEPKSCGGGGQGGGGQGGGGQGGGGQGGGGQGGGGQGGGGQGGGGQEIVMTQSPDSLAVSLGERATINCKSSQSVLYSSNNKNYLAWYHQKPGQSPKLLISWASTRESGVPDRFSGSGSGTDFTLTINSLQAEDVAVYYCQQYYSIPITFGGGTKVEIKRTVAAPSVFIFPPSDEQLKSGTASVVCLLNNFYPREAKVQWKVDNALQSGNSQESVTEQDSKDSTYSLSSTLTLSKADYEKHKVYACEVTHQGLSSPVTKSFNRGECSGGGGQEVQLVESGGGLVQPGGSLKLSCAASGFTFNKYAINWVRQAPGKGLEWVARIRSKYNNYATYYADAVKDRFTISRDDSKNTVYLQMNNLKTEDTAVYYCARAGNFGSSYISYWAYWGQGTLVTVSSGGGGQGGGGQGGGGQQTVVTQEPSLTVSPGGTVTITCGSSTGAVTSGNYPNWVQKKPGQAPRGLIGGTKFLAPGTPARFSGSLSGGKAALTLSGVQPEDEAEYYCVLWYSNRWVFGSGTKLTVLGGGGCPPCPAPELLGGPSVFLFPPKPKDTLMISRTPEVTCVVVDVSHEEPEVKFNWYVDGVEVHNAKTKPCEEQYGSTYRCVSVLTVLHQDWLNGKEYKCKVSNKALPAPIEKTISKAKGQPREPQVYTLPPSREEMTKNQVSLTCLVKGFYPSDIAVEWESNGQPENNYKTTPPVLDSDGSFFLYSKLTVDKSRWQQGNVFSCSVMHEALHNHYTQKSLSLSPGGGGQGGGGQGGGGQGGGGQGGGGQGGGGQCPPCPAPELLGGPSVFLFPPKPKDTLMISRTPEVTCVVVDVSHEEPEVKFNWYVDGVEVHNAKTKPCEEQYGSTYRCVSVLTVLHQDWLNGKEYKCKVSNKALPAPIEKTISKAKGQPREPQVYTLPPSREEMTKNQVSLTCLVKGFYPSDIAVEWESNGQPENNYKTTPPVLDSDGSFFLYSKLTVDKSRWQQGNVFSCSVMHEALHNHYTQKSLSLSPGK

SEQ ID NO: 261 - protein, 5 aa, Artificial Sequence
  Synthetic Polypeptide
SHAMS

SEQ ID NO: 262 - protein, 17 aa, Artificial Sequence
  Synthetic Polypeptide
TISGSGGGTYYAASVKG

SEQ ID NO: 263 - protein, 10 aa, Artificial Sequence
  Synthetic Polypeptide
GKGVHLGFDY

SEQ ID NO: 264 - protein, 11 aa, Artificial Sequence
  Synthetic Polypeptide
GGNNIGSKSVH

SEQ ID NO: 265 - protein, 7 aa, Artificial Sequence
  Synthetic Polypeptide
DDNDRPS

SEQ ID NO: 266 - protein, 11 aa, Artificial Sequence
  Synthetic Polypeptide
QVWDYRTLDWV

SEQ ID NO: 267 - protein, 119 aa, Artificial Sequence
  Synthetic Polypeptide
EVQLLESGGGLVQPGGSLRLSCAASGFTFSSHAMSWVRQAPGKCLEWVSTISGSGGGTYYAASVKGRFTISRDNSKNTLYLQMNSLRAEDTAVYYCATGKGVHLGFDYWGQGTLVTVSS

SEQ ID NO: 268 - protein, 108 aa, Artificial Sequence
  Synthetic Polypeptide
SYVLTQPPSVSVAPGQTARITCGGNNIGSKSVHWYQQKPGQAPVMVVYDDNDRPSGIPERFSGSNFGNTATLIISRVEAGDEADYYCQVWDYRTLDWVFGCGTKLTVL

SEQ ID NO: 269 - protein, 242 aa, Artificial Sequence
  Synthetic Polypeptide
EVQLLESGGGLVQPGGSLRLSCAASGFTFSSHAMSWVRQAPGKCLEWVSTISGSGGGTYYAASVKGRFTISRDNSKNTLYLQMNSLRAEDTAVYYCATGKGVHLGFDYWGQGTLVTVSSGGGGSGGGGSGGGGSSYVLTQPPSVSVAPGQTARITCGGNNIGSKSVHWYQQKPGQAPVMVVYDDNDRPSGIPERFSGSNFGNTATLIISRVEAGDEADYYCQVWDYRTLDWVFGCGTKLTVL

SEQ ID NO: 270 - protein, 497 aa, Artificial Sequence
  Synthetic Polypeptide
EVQLLESGGGLVQPGGSLRLSCAASGFTFSSHAMSWVRQAPGKCLEWVSTISGSGGGTYYAASVKGRFTISRDNSKNTLYLQMNSLRAEDTAVYYCATGKGVHLGFDYWGQGTLVTVSSGGGGSGGGGSGGGGSSYVLTQPPSVSVAPGQTARITCGGNNIGSKSVHWYQQKPGQAPVMVVYDDNDRPSGIPERFSGSNFGNTATLIISRVEAGDEADYYCQVWDYRTLDWVFGCGTKLTVLSGGGGSEVQLVESGGGLVQPGGSLKLSCAASGFTFNKYAMNWVRQAPGKGLEWVARIRSKYNNYATYYADSVKDRFTISRDDSKNTAYLQMNNLKTEDTAVYYCVRHGNFGNSYISYWAYWGQGTLVTVSSGGGGSGGGGSGGGGSQTVVTQEPSLTVSPGGTVTLTCGSSTGAVTSGNYPNWVQQKPGQAPRGLIGGTKFLAPGTPARFSGSLLGGKAALTLSGVQPEDEAEYYCVLWYSNRWVFGGGTKLTVL

SEQ ID NO: 271 - protein, 985 aa, Artificial Sequence
  Synthetic Polypeptide
EVQLLESGGGLVQPGGSLRLSCAASGFTFSSHAMSWVRQAPGKCLEWVSTISGSGGGTYYAASVKGRFTISRDNSKNTLYLQMNSLRAEDTAVYYCATGKGVHLGFDYWGQGTLVTVSSGGGGSGGGGSGGGGSSYVLTQPPSVSVAPGQTARITCGGNNIGSKSVHWYQQKPGQAPVMVVYDDNDRPSGIPERFSGSNFGNTATLIISRVEAGDEADYYCQVWDYRTLDWVFGCGTKLTVLSGGGGSEVQLVESGGGLVQPGGSLKLSCAASGFTFNKYAMNWVRQAPGKGLEWVARIRSKYNNYATYYADSVKDRFTISRDDSKNTAYLQMNNLKTEDTAVYYCVRHGNFGNSYISYWAYWGQGTLVTVSSGGGGSGGGGSGGGGSQTVVTQEPSLTVSPGGTVTLTCGSSTGAVTSGNYPNWVQQKPGQAPRGLIGGTKFLAPGTPARFSGSLLGGKAALTLSGVQPEDEAEYYCVLWYSNRWVFGGGTKLTVLGGGGDKTHTCPPCPAPELLGGPSVFLFPPKPKDTLMISRTPEVTCVVVDVSHEDPEVKFNWYVDGVEVHNAKTKPCEEQYGSTYRCVSVLTVLHQDWLNGKEYKCKVSNKALPAPIEKTISKAKGQPREPQVYTLPPSREEMTKNQVSLTCLVKGFYPSDIAVEWESNGQPENNYKTTPPVLDSDGSFFLYSKLTVDKSRWQQGNVFSCSVMHEALHNHYTQKSLSLSPGKGGGGSGGGGSGGGGSGGGGSGGGGSGGGGSDKTHTCPPCPAPELLGGPSVFLFPPKPKDTLMISRTPEVTCVVVDVSHEDPEVKFNWYVDGVEVHNAKTKPCEEQYGSTYRCVSVLTVLHQDWLNGKEYKCKVSNKALPAPIEKTISKAKGQPREPQVYTLPPSREEMTKNQVSLTCLVKGFYPSDIAVEWESNGQPENNYKTTPPVLDSDGSFFLYSKLTVDKSRWQQGNVFSCSVMHEALHNHYTQKSLSLSPGK

SEQ ID NO: 272 - protein, 222 aa, Artificial Sequence
  Synthetic Polypeptide
EVQLLESGGGLVQPGGSLRLSCAASGFTFSSHAMSWVRQAPGKGLEWVSTISGSGGGTYYAASVKGRFTISRDNSKNTLYLQMNSLRAEDTAVYYCATGKGVHLGFDYWGQGTLVTVSSASTKGPSVFPLAPSSKSTSGGTAALGCLVKDYFPEPVTVSWNSGALTSGVHTFPAVLQSSGLYSLSSVVTVPSSSLGTQTYICNVNHKPSNTKVDKKVEPKSC

SEQ ID NO: 273 - protein, 214 aa, Artificial Sequence
  Synthetic Polypeptide
SYVLTQPPSVSVAPGQTARITCGGNNIGSKSVHWYQQKPGQAPVMVVYDDNDRPSGIPERFSGSNFGNTATLIISRVEAGDEADYYCQVWDYRTLDWVFGGGTKLTVLGQPKAAPSVTLFPPSSEELQANKATLVCLISDFYPGAVTVAWKADSSPVKAGVETTTPSKQSNNKYAASSYLSLTPEQWKSHKSYSCQVTHEGSTVEKTVAPTECS

SEQ ID NO: 274 - protein, 476 aa, Artificial Sequence
  Synthetic Polypeptide
EVQLLESGGGLVQPGGSLRLSCAASGFTFSSHAMSWVRQAPGKGLEWVSTISGSGGGTYYAASVKGRFTISRDNSKNTLYLQMNSLRAEDTAVYYCATGKGVHLGFDYWGQGTLVTVSSASTKGPSVFPLAPSSKSTSGGTAALGCLVKDYFPEPVTVSWNSGALTSGVHTFPAVLQSSGLYSLSSVVTVPSSSLGTQTYICNVNHKPSNTKVDKKVEPKSCGGGGSGGGGSGGGGSGGGGSGGGGSGGGGSGGGGSGGGGSSYVLTQPPSVSVAPGQTARITCGGNNIGSKSVHWYQQKPGQAPVMVVYDDNDRPSGIPERFSGSNFGNTATLIISRVEAGDEADYYCQVWDYRTLDWVFGGGTKLTVLGQPKAAPSVTLFPPSSEELQANKATLVCLISDFYPGAVTVAWKADSSPVKAGVETTTPSKQSNNKYAASSYLSLTPEQWKSHKSYSCQVTHEGSTVEKTVAPTECS

SEQ ID NO: 275 - protein, 731 aa, Artificial Sequence
  Synthetic Polypeptide
EVQLLESGGGLVQPGGSLRLSCAASGFTFSSHAMSWVRQAPGKGLEWVSTISGSGGGTYYAASVKGRFTISRDNSKNTLYLQMNSLRAEDTAVYYCATGKGVHLGFDYWGQGTLVTVSSASTKGPSVFPLAPSSKSTSGGTAALGCLVKDYFPEPVTVSWNSGALTSGVHTFPAVLQSSGLYSLSSVVTVPSSSLGTQTYICNVNHKPSNTKVDKKVEPKSCGGGGSGGGGSGGGGSGGGGSGGGGSGGGGSGGGGSGGGGSSYVLTQPPSVSVAPGQTARITCGGNNIGSKSVHWYQQKPGQAPVMVVYDDNDRPSGIPERFSGSNFGNTATLIISRVEAGDEADYYCQVWDYRTLDWVFGGGTKLTVLGQPKAAPSVTLFPPSSEELQANKATLVCLISDFYPGAVTVAWKADSSPVKAGVETTTPSKQSNNKYAASSYLSLTPEQWKSHKSYSCQVTHEGSTVEKTVAPTECSSGGGGSEVQLVESGGGLVQPGGSLKLSCAASGFTFNKYAMNWVRQAPGKGLEWVARIRSKYNNYATYYADSVKDRFTISRDDSKNTAYLQMNNLKTEDTAVYYCVRHGNFGNSYISYWAYWGQGTLVTVSSGGGGSGGGGSGGGGSQTVVTQEPSLTVSPGGTVTLTCGSSTGAVTSGNYPNWVQQKPGQAPRGLIGGTKFLAPGTPARFSGSLLGGKAALTLSGVQPEDEAEYYCVLWYSNRWVFGGGTKLTVL

SEQ ID NO: 276 - protein, 1219 aa, Artificial Sequence
  Synthetic Polypeptide
EVQLLESGGGLVQPGGSLRLSCAASGFTFSSHAMSWVRQAPGKGLEWVSTISGSGGGTYYAASVKGRFTISRDNSKNTLYLQMNSLRAEDTAVYYCATGKGVHLGFDYWGQGTLVTVSSASTKGPSVFPLAPSSKSTSGGTAALGCLVKDYFPEPVTVSWNSGALTSGVHTFPAVLQSSGLYSLSSVVTVPSSSLGTQTYICNVNHKPSNTKVDKKVEPKSCGGGGSGGGGSGGGGSGGGGSGGGGSGGGGSGGGGSGGGGSSYVLTQPPSVSVAPGQTARITCGGNNIGSKSVHWYQQKPGQAPVMVVYDDNDRPSGIPERFSGSNFGNTATLIISRVEAGDEADYYCQVWDYRTLDWVFGGGTKLTVLGQPKAAPSVTLFPPSSEELQANKATLVCLISDFYPGAVTVAWKADSSPVKAGVETTTPSKQSNNKYAASSYLSLTPEQWKSHKSYSCQVTHEGSTVEKTVAPTECSSGGGGSEVQLVESGGGLVQPGGSLKLSCAASGFTFNKYAMNWVRQAPGKGLEWVARIRSKYNNYATYYADSVKDRFTISRDDSKNTAYLQMNNLKTEDTAVYYCVRHGNFGNSYISYWAYWGQGTLVTVSSGGGGSGGGGSGGGGSQTVVTQEPSLTVSPGGTVTLTCGSSTGAVTSGNYPNWVQQKPGQAPRGLIGGTKFLAPGTPARFSGSLLGGKAALTLSGVQPEDEAEYYCVLWYSNRWVFGGGTKLTVLGGGGDKTHTCPPCPAPELLGGPSVFLFPPKPKDTLMISRTPEVTCVVVDVSHEDPEVKFNWYVDGVEVHNAKTKPCEEQYGSTYRCVSVLTVLHQDWLNGKEYKCKVSNKALPAPIEKTISKAKGQPREPQVYTLPPSREEMTKNQVSLTCLVKGFYPSDIAVEWESNGQPENNYKTTPPVLDSDGSFFLYSKLTVDKSRWQQGNVFSCSVMHEALHNHYTQKSLSLSPGKGGGGSGGGGSGGGGSGGGGSGGGGSGGGGSDKTHTCPPCPAPELLGGPSVFLFPPKPKDTLMISRTPEVTCVVVDVSHEDPEVKFNWYVDGVEVHNAKTKPCEEQYGSTYRCVSVLTVLHQDWLNGKEYKCKVSNKALPAPIEKTISKAKGQPREPQVYTLPPSREEMTKNQVSLTCLVKGFYPSDIAVEWESNGQPENNYKTTPPVLDSDGSFFLYSKLTVDKSRWQQGNVFSCSVMHEALHNHYTQKSLSLSPGK

SEQ ID NO: 277 - protein, 5 aa, Artificial Sequence
  Synthetic Polypeptide
SHAMS

SEQ ID NO: 278 - protein, 17 aa, Artificial Sequence
  Synthetic Polypeptide
SISGSGGGTYYAASVKG

SEQ ID NO: 279 - protein, 10 aa, Artificial Sequence
  Synthetic Polypeptide
GKGVHLGFDY

SEQ ID NO: 280 - protein, 11 aa, Artificial Sequence
  Synthetic Polypeptide
GGNNIGSKSVH

SEQ ID NO: 281 - protein, 7 aa, Artificial Sequence
  Synthetic Polypeptide
DDNDRPS

SEQ ID NO: 282 - protein, 11 aa, Artificial Sequence
  Synthetic Polypeptide
QVWDYSPLRHV

SEQ ID NO: 283 - protein, 119 aa, Artificial Sequence
  Synthetic Polypeptide
EVQLLESGGGLVQPGGSLRLSCAASGFTFSSHAMSWVRQAPGKCLEWVSSISGSGGGTYYAASVKGRFTISRDNSKNTLYLQMNSLRAEDTAVYYCATGKGVHLGFDYWGQGTLVTVSS

SEQ ID NO: 284 - protein, 108 aa, Artificial Sequence
  Synthetic Polypeptide
SYVLTQPPSVSVAPGQTARITCGGNNIGSKSVHWYQQKPGQAPVMVVYDDNDRPSGIPERFSGSNSGNTATLTISRVEAGDEADYYCQVWDYSPLRHVFGCGTKLTVL

SEQ ID NO: 285 - protein, 242 aa, Artificial Sequence
  Synthetic Polypeptide
EVQLLESGGGLVQPGGSLRLSCAASGFTFSSHAMSWVRQAPGKCLEWVSSISGSGGGTYYAASVKGRFTISRDNSKNTLYLQMNSLRAEDTAVYYCATGKGVHLGFDYWGQGTLVTVSSGGGGSGGGGSGGGGSSYVLTQPPSVSVAPGQTARITCGGNNIGSKSVHWYQQKPGQAPVMVVYDDNDRPSGIPERFSGSNSGNTATLTISRVEAGDEADYYCQVWDYSPLRHVFGCGTKLTVL

SEQ ID NO: 286 - protein, 497 aa, Artificial Sequence
  Synthetic Polypeptide
EVQLLESGGGLVQPGGSLRLSCAASGFTFSSHAMSWVRQAPGKCLEWVSSISGSGGGTYYAASVKGRFTISRDNSKNTLYLQMNSLRAEDTAVYYCATGKGVHLGFDYWGQGTLVTVSSGGGGSGGGGSGGGGSSYVLTQPPSVSVAPGQTARITCGGNNIGSKSVHWYQQKPGQAPVMVVYDDNDRPSGIPERFSGSNSGNTATLTISRVEAGDEADYYCQVWDYSPLRHVFGCGTKLTVLSGGGGSEVQLVESGGGLVQPGGSLKLSCAASGFTFNKYAMNWVRQAPGKGLEWVARIRSKYNNYATYYADSVKDRFTISRDDSKNTAYLQMNNLKTEDTAVYYCVRHGNFGNSYISYWAYWGQGTLVTVSSGGGGSGGGGSGGGGSQTVVTQEPSLTVSPGGTVTLTCGSSTGAVTSGNYPNWVQQKPGQAPRGLIGGTKFLAPGTPARFSGSLLGGKAALTLSGVQPEDEAEYYCVLWYSNRWVFGGGTKLTVL

SEQ ID NO: 287 - protein, 985 aa, Artificial Sequence
  Synthetic Polypeptide
EVQLLESGGGLVQPGGSLRLSCAASGFTFSSHAMSWVRQAPGKCLEWVSSISGSGGGTYYAASVKGRFTISRDNSKNTLYLQMNSLRAEDTAVYYCATGKGVHLGFDYWGQGTLVTVSSGGGGSGGGGSGGGGSSYVLTQPPSVSVAPGQTARITCGGNNIGSKSVHWYQQKPGQAPVMVVYDDNDRPSGIPERFSGSNSGNTATLTISRVEAGDEADYYCQVWDYSPLRHVFGCGTKLTVLSGGGGSEVQLVESGGGLVQPGGSLKLSCAASGFTFNKYAMNWVRQAPGKGLEWVARIRSKYNNYATYYADSVKDRFTISRDDSKNTAYLQMNNLKTEDTAVYYCVRHGNFGNSYISYWAYWGQGTLVTVSSGGGGSGGGGSGGGGSQTVVTQEPSLTVSPGGTVTLTCGSSTGAVTSGNYPNWVQQKPGQAPRGLIGGTKFLAPGTPARFSGSLLGGKAALTLSGVQPEDEAEYYCVLWYSNRWVFGGGTKLTVLGGGGDKTHTCPPCPAPELLGGPSVFLFPPKPKDTLMISRTPEVTCVVVDVSHEDPEVKFNWYVDGVEVHNAKTKPCEEQYGSTYRCVSVLTVLHQDWLNGKEYKCKVSNKALPAPIEKTISKAKGQPREPQVYTLPPSREEMTKNQVSLTCLVKGFYPSDIAVEWESNGQPENNYKTTPPVLDSDGSFFLYSKLTVDKSRWQQGNVFSCSVMHEALHNHYTQKSLSLSPGKGGGGSGGGGSGGGGSGGGGSGGGGSGGGGSDKTHTCPPCPAPELLGGPSVFLFPPKPKDTLMISRTPEVTCVVVDVSHEDPEVKFNWYVDGVEVHNAKTKPCEEQYGSTYRCVSVLTVLHQDWLNGKEYKCKVSNKALPAPIEKTISKAKGQPREPQVYTLPPSREEMTKNQVSLTCLVKGFYPSDIAVEWESNGQPENNYKTTPPVLDSDGSFFLYSKLTVDKSRWQQGNVFSCSVMHEALHNHYTQKSLSLSPGK

SEQ ID NO: 288 - protein, 222 aa, Artificial Sequence
  Synthetic Polypeptide
EVQLLESGGGLVQPGGSLRLSCAASGFTFSSHAMSWVRQAPGKGLEWVSSISGSGGGTYYAASVKGRFTISRDNSKNTLYLQMNSLRAEDTAVYYCATGKGVHLGFDYWGQGTLVTVSSASTKGPSVFPLAPSSKSTSGGTAALGCLVKDYFPEPVTVSWNSGALTSGVHTFPAVLQSSGLYSLSSVVTVPSSSLGTQTYICNVNHKPSNTKVDKKVEPKSC

SEQ ID NO: 289 - protein, 214 aa, Artificial Sequence
  Synthetic Polypeptide
SYVLTQPPSVSVAPGQTARITCGGNNIGSKSVHWYQQKPGQAPVMVVYDDNDRPSGIPERFSGSNSGNTATLTISRVEAGDEADYYCQVWDYSPLRHVFGGGTKLTVLGQPKAAPSVTLFPPSSEELQANKATLVCLISDFYPGAVTVAWKADSSPVKAGVETTTPSKQSNNKYAASSYLSLTPEQWKSHKSYSCQVTHEGSTVEKTVAPTECS

SEQ ID NO: 290 - protein, 476 aa, Artificial Sequence
  Synthetic Polypeptide
EVQLLESGGGLVQPGGSLRLSCAASGFTFSSHAMSWVRQAPGKGLEWVSSISGSGGGTYYAASVKGRFTISRDNSKNTLYLQMNSLRAEDTAVYYCATGKGVHLGFDYWGQGTLVTVSSASTKGPSVFPLAPSSKSTSGGTAALGCLVKDYFPEPVTVSWNSGALTSGVHTFPAVLQSSGLYSLSSVVTVPSSSLGTQTYICNVNHKPSNTKVDKKVEPKSCGGGGSGGGGSGGGGSGGGGSGGGGSGGGGSGGGGSGGGGSSYVLTQPPSVSVAPGQTARITCGGNNIGSKSVHWYQQKPGQAPVMVVYDDNDRPSGIPERFSGSNSGNTATLTISRVEAGDEADYYCQVWDYSPLRHVFGGGTKLTVLGQPKAAPSVTLFPPSSEELQANKATLVCLISDFYPGAVTVAWKADSSPVKAGVETTTPSKQSNNKYAASSYLSLTPEQWKSHKSYSCQVTHEGSTVEKTVAPTECS

SEQ ID NO: 291 - protein, 731 aa, Artificial Sequence
  Synthetic Polypeptide
EVQLLESGGGLVQPGGSLRLSCAASGFTFSSHAMSWVRQAPGKGLEWVSSISGSGGGTYYAASVKGRFTISRDNSKNTLYLQMNSLRAEDTAVYYCATGKGVHLGFDYWGQGTLVTVSSASTKGPSVFPLAPSSKSTSGGTAALGCLVKDYFPEPVTVSWNSGALTSGVHTFPAVLQSSGLYSLSSVVTVPSSSLGTQTYICNVNHKPSNTKVDKKVEPKSCGGGGSGGGGSGGGGSGGGGSGGGGSGGGGSGGGGSGGGGSSYVLTQPPSVSVAPGQTARITCGGNNIGSKSVHWYQQKPGQAPVMVVYDDNDRPSGIPERFSGSNSGNTATLTISRVEAGDEADYYCQVWDYSPLRHVFGGGTKLTVLGQPKAAPSVTLFPPSSEELQANKATLVCLISDFYPGAVTVAWKADSSPVKAGVETTTPSKQSNNKYAASSYLSLTPEQWKSHKSYSCQVTHEGSTVEKTVAPTECSSGGGGSEVQLVESGGGLVQPGGSLKLSCAASGFTFNKYAMNWVRQAPGKGLEWVARIRSKYNNYATYYADSVKDRFTISRDDSKNTAYLQMNNLKTEDTAVYYCVRHGNFGNSYISYWAYWGQGTLVTVSSGGGGSGGGGSGGGGSQTVVTQEPSLTVSPGGTVTLTCGSSTGAVTSGNYPNWVQQKPGQAPRGLIGGTKFLAPGTPARFSGSLLGGKAALTLSGVQPEDEAEYYCVLWYSNRWVFGGGTKLTVL

SEQ ID NO: 292 - protein, 1219 aa, Artificial Sequence
  Synthetic Polypeptide
EVQLLESGGGLVQPGGSLRLSCAASGFTFSSHAMSWVRQAPGKGLEWVSSISGSGGGTYYAASVKGRFTISRDNSKNTLYLQMNSLRAEDTAVYYCATGKGVHLGFDYWGQGTLVTVSSASTKGPSVFPLAPSSKSTSGGTAALGCLVKDYFPEPVTVSWNSGALTSGVHTFPAVLQSSGLYSLSSVVTVPSSSLGTQTYICNVNHKPSNTKVDKKVEPKSCGGGGSGGGGSGGGGSGGGGSGGGGSGGGGSGGGGSGGGGSSYVLTQPPSVSVAPGQTARITCGGNNIGSKSVHWYQQKPGQAPVMVVYDDNDRPSGIPERFSGSNSGNTATLTISRVEAGDEADYYCQVWDYSPLRHVFGGGTKLTVLGQPKAAPSVTLFPPSSEELQANKATLVCLISDFYPGAVTVAWKADSSPVKAGVETTTPSKQSNNKYAASSYLSLTPEQWKSHKSYSCQVTHEGSTVEKTVAPTECSSGGGGSEVQLVESGGGLVQPGGSLKLSCAASGFTFNKYAMNWVRQAPGKGLEWVARIRSKYNNYATYYADSVKDRFTISRDDSKNTAYLQMNNLKTEDTAVYYCVRHGNFGNSYISYWAYWGQGTLVTVSSGGGGSGGGGSGGGGSQTVVTQEPSLTVSPGGTVTLTCGSSTGAVTSGNYPNWVQQKPGQAPRGLIGGTKFLAPGTPARFSGSLLGGKAALTLSGVQPEDEAEYYCVLWYSNRWVFGGGTKLTVLGGGGDKTHTCPPCPAPELLGGPSVFLFPPKPKDTLMISRTPEVTCVVVDVSHEDPEVKFNWYVDGVEVHNAKTKPCEEQYGSTYRCVSVLTVLHQDWLNGKEYKCKVSNKALPAPIEKTISKAKGQPREPQVYTLPPSREEMTKNQVSLTCLVKGFYPSDIAVEWESNGQPENNYKTTPPVLDSDGSFFLYSKLTVDKSRWQQGNVFSCSVMHEALHNHYTQKSLSLSPGKGGGGSGGGGSGGGGSGGGGSGGGGSGGGGSDKTHTCPPCPAPELLGGPSVFLFPPKPKDTLMISRTPEVTCVVVDVSHEDPEVKFNWYVDGVEVHNAKTKPCEEQYGSTYRCVSVLTVLHQDWLNGKEYKCKVSNKALPAPIEKTISKAKGQPREPQVYTLPPSREEMTKNQVSLTCLVKGFYPSDIAVEWESNGQPENNYKTTPPVLDSDGSFFLYSKLTVDKSRWQQGNVFSCSVMHEALHNHYTQKSLSLSPGK

SEQ ID NO: 293 - protein, 5 aa, Artificial Sequence
  Synthetic Polypeptide
NAWMS

SEQ ID NO: 294 - protein, 19 aa, Artificial Sequence
  Synthetic Polypeptide
RIKSKTYGGTTDYAAPVKG

SEQ ID NO: 295 - protein, 16 aa, Artificial Sequence
  Synthetic Polypeptide
PSYSGSYYNYFSVMDV

SEQ ID NO: 296 - protein, 11 aa, Artificial Sequence
  Synthetic Polypeptide
RTSQSISSYLN

SEQ ID NO: 297 - protein, 7 aa, Artificial Sequence
  Synthetic Polypeptide
AASSLQG

SEQ ID NO: 298 - protein, 9 aa, Artificial Sequence
  Synthetic Polypeptide
QQSYSSPFT

SEQ ID NO: 299 - protein, 127 aa, Artificial Sequence
  Synthetic Polypeptide
EVQLVESGGGLVQPGGSLRLSCAASGFTFSNAWMSWVRQAPGKCLEWVGRIKSKTYGGTTDYAAPVKGRFTISRDDSKNTLFLQMNSLKTEDTAVYYCTTPSYSGSYYNYFSVMDVWGQGTTVTVSS

SEQ ID NO: 300 - protein, 107 aa, Artificial Sequence
  Synthetic Polypeptide
DIQMTQSPSSLSASVGDRVTITCRTSQSISSYLNWYQQKPGRAPKLLIFAASSLQGGVPSRFSGSGSGTDFTLTISSLQPEDFATYYCQQSYSSPFTFGCGTKVEIK

SEQ ID NO: 301 - protein, 249 aa, Artificial Sequence
  Synthetic Polypeptide
EVQLVESGGGLVQPGGSLRLSCAASGFTFSNAWMSWVRQAPGKCLEWVGRIKSKTYGGTTDYAAPVKGRFTISRDDSKNTLFLQMNSLKTEDTAVYYCTTPSYSGSYYNYFSVMDVWGQGTTVTVSSGGGGSGGGGSGGGGSDIQMTQSPSSLSASVGDRVTITCRTSQSISSYLNWYQQKPGRAPKLLIFAASSLQGGVPSRFSGSGSGTDFTLTISSLQPEDFATYYCQQSYSSPFTFGCGTKVEIK

SEQ ID NO: 302 - protein, 504 aa, Artificial Sequence
  Synthetic Polypeptide
EVQLVESGGGLVQPGGSLRLSCAASGFTFSNAWMSWVRQAPGKCLEWVGRIKSKTYGGTTDYAAPVKGRFTISRDDSKNTLFLQMNSLKTEDTAVYYCTTPSYSGSYYNYFSVMDVWGQGTTVTVSSGGGGSGGGGSGGGGSDIQMTQSPSSLSASVGDRVTITCRTSQSISSYLNWYQQKPGRAPKLLIFAASSLQGGVPSRFSGSGSGTDFTLTISSLQPEDFATYYCQQSYSSPFTFGCGTKVEIKSGGGGSEVQLVESGGGLVQPGGSLKLSCAASGFTFNKYAMNWVRQAPGKGLEWVARIRSKYNNYATYYADSVKDRFTISRDDSKNTAYLQMNNLKTEDTAVYYCVRHGNFGNSYISYWAYWGQGTLVTVSSGGGGSGGGGSGGGGSQTVVTQEPSLTVSPGGTVTLTCGSSTGAVTSGNYPNWVQQKPGQAPRGLIGGTKFLAPGTPARFSGSLLGGKAALTLSGVQPEDEAEYYCVLWYSNRWVFGGGTKLTVL

SEQ ID NO: 303 - protein, 992 aa, Artificial Sequence
  Synthetic Polypeptide
EVQLVESGGGLVQPGGSLRLSCAASGFTFSNAWMSWVRQAPGKCLEWVGRIKSKTYGGTTDYAAPVKGRFTISRDDSKNTLFLQMNSLKTEDTAVYYCTTPSYSGSYYNYFSVMDVWGQGTTVTVSSGGGGSGGGGSGGGGSDIQMTQSPSSLSASVGDRVTITCRTSQSISSYLNWYQQKPGRAPKLLIFAASSLQGGVPSRFSGSGSGTDFTLTISSLQPEDFATYYCQQSYSSPFTFGCGTKVEIKSGGGGSEVQLVESGGGLVQPGGSLKLSCAASGFTFNKYAMNWVRQAPGKGLEWVARIRSKYNNYATYYADSVKDRFTISRDDSKNTAYLQMNNLKTEDTAVYYCVRHGNFGNSYISYWAYWGQGTLVTVSSGGGGSGGGGSGGGGSQTVVTQEPSLTVSPGGTVTLTCGSSTGAVTSGNYPNWVQQKPGQAPRGLIGGTKFLAPGTPARFSGSLLGGKAALTLSGVQPEDEAEYYCVLWYSNRWVFGGGTKLTVLGGGGDKTHTCPPCPAPELLGGPSVFLFPPKPKDTLMISRTPEVTCVVVDVSHEDPEVKFNWYVDGVEVHNAKTKPCEEQYGSTYRCVSVLTVLHQDWLNGKEYKCKVSNKALPAPIEKTISKAKGQPREPQVYTLPPSREEMTKNQVSLTCLVKGFYPSDIAVEWESNGQPENNYKTTPPVLDSDGSFFLYSKLTVDKSRWQQGNVFSCSVMHEALHNHYTQKSLSLSPGKGGGGSGGGGSGGGGSGGGGSGGGGSGGGGSDKTHTCPPCPAPELLGGPSVFLFPPKPKDTLMISRTPEVTCVVVDVSHEDPEVKFNWYVDGVEVHNAKTKPCEEQYGSTYRCVSVLTVLHQDWLNGKEYKCKVSNKALPAPIEKTISKAKGQPREPQVYTLPPSREEMTKNQVSLTCLVKGFYPSDIAVEWESNGQPENNYKTTPPVLDSDGSFFLYSKLTVDKSRWQQGNVFSCSVMHEALHNHYTQKSLSLSPGK

SEQ ID NO: 304 - protein, 230 aa, Artificial Sequence
  Synthetic Polypeptide
EVQLVESGGGLVQPGGSLRLSCAASGFTFSNAWMSWVRQAPGKGLEWVGRIKSKTYGGTTDYAAPVKGRFTISRDDSKNTLFLQMNSLKTEDTAVYYCTTPSYSGSYYNYFSVMDVWGQGTTVTVSSASTKGPSVFPLAPSSKSTSGGTAALGCLVKDYFPEPVTVSWNSGALTSGVHTFPAVLQSSGLYSLSSVVTVPSSSLGTQTYICNVNHKPSNTKVDKKVEPKSC

SEQ ID NO: 305 - protein, 214 aa, Artificial Sequence
  Synthetic Polypeptide
DIQMTQSPSSLSASVGDRVTITCRTSQSISSYLNWYQQKPGRAPKLLIFAASSLQGGVPSRFSGSGSGTDFTLTISSLQPEDFATYYCQQSYSSPFTFGPGTKVEIKRTVAAPSVFIFPPSDEQLKSGTASVVCLLNNFYPREAKVQWKVDNALQSGNSQESVTEQDSKDSTYSLSSTLTLSKADYEKHKVYACEVTHQGLSSPVTKSFNRGEC

SEQ ID NO: 306 - protein, 484 aa, Artificial Sequence
  Synthetic Polypeptide
EVQLVESGGGLVQPGGSLRLSCAASGFTFSNAWMSWVRQAPGKGLEWVGRIKSKTYGGTTDYAAPVKGRFTISRDDSKNTLFLQMNSLKTEDTAVYYCTTPSYSGSYYNYFSVMDVWGQGTTVTVSSASTKGPSVFPLAPSSKSTSGGTAALGCLVKDYFPEPVTVSWNSGALTSGVHTFPAVLQSSGLYSLSSVVTVPSSSLGTQTYICNVNHKPSNTKVDKKVEPKSCGGGGSGGGGSGGGGSGGGGSGGGGSGGGGSGGGGSGGGGSDIQMTQSPSSLSASVGDRVTITCRTSQSISSYLNWYQQKPGRAPKLLIFAASSLQGGVPSRFSGSGSGTDFTLTISSLQPEDFATYYCQQSYSSPFTFGPGTKVEIKRTVAAPSVFIFPPSDEQLKSGTASVVCLLNNFYPREAKVQWKVDNALQSGNSQESVTEQDSKDSTYSLSSTLTLSKADYEKHKVYACEVTHQGLSSPVTKSFNRGEC

SEQ ID NO: 307 - protein, 739 aa, Artificial Sequence
  Synthetic Polypeptide
EVQLVESGGGLVQPGGSLRLSCAASGFTFSNAWMSWVRQAPGKGLEWVGRIKSKTYGGTTDYAAPVKGRFTISRDDSKNTLFLQMNSLKTEDTAVYYCTTPSYSGSYYNYFSVMDVWGQGTTVTVSSASTKGPSVFPLAPSSKSTSGGTAALGCLVKDYFPEPVTVSWNSGALTSGVHTFPAVLQSSGLYSLSSVVTVPSSSLGTQTYICNVNHKPSNTKVDKKVEPKSCGGGGSGGGGSGGGGSGGGGSGGGGSGGGGSGGGGSGGGGSDIQMTQSPSSLSASVGDRVTITCRTSQSISSYLNWYQQKPGRAPKLLIFAASSLQGGVPSRFSGSGSGTDFTLTISSLQPEDFATYYCQQSYSSPFTFGPGTKVEIKRTVAAPSVFIFPPSDEQLKSGTASVVCLLNNFYPREAKVQWKVDNALQSGNSQESVTEQDSKDSTYSLSSTLTLSKADYEKHKVYACEVTHQGLSSPVTKSFNRGECSGGGGSEVQLVESGGGLVQPGGSLKLSCAASGFTFNKYAMNWVRQAPGKGLEWVARIRSKYNNYATYYADSVKDRFTISRDDSKNTAYLQMNNLKTEDTAVYYCVRHGNFGNSYISYWAYWGQGTLVTVSSGGGGSGGGGSGGGGSQTVVTQEPSLTVSPGGTVTLTCGSSTGAVTSGNYPNWVQQKPGQAPRGLIGGTKFLAPGTPARFSGSLLGGKAALTLSGVQPEDEAEYYCVLWYSNRWVFGGGTKLTVL

SEQ ID NO: 308 - protein, 1227 aa, Artificial Sequence
  Synthetic Polypeptide
EVQLVESGGGLVQPGGSLRLSCAASGFTFSNAWMSWVRQAPGKGLEWVGRIKSKTYGGTTDYAAPVKGRFTISRDDSKNTLFLQMNSLKTEDTAVYYCTTPSYSGSYYNYFSVMDVWGQGTTVTVSSASTKGPSVFPLAPSSKSTSGGTAALGCLVKDYFPEPVTVSWNSGALTSGVHTFPAVLQSSGLYSLSSVVTVPSSSLGTQTYICNVNHKPSNTKVDKKVEPKSCGGGGSGGGGSGGGGSGGGGSGGGGSGGGGSGGGGSGGGGSDIQMTQSPSSLSASVGDRVTITCRTSQSISSYLNWYQQKPGRAPKLLIFAASSLQGGVPSRFSGSGSGTDFTLTISSLQPEDFATYYCQQSYSSPFTFGPGTKVEIKRTVAAPSVFIFPPSDEQLKSGTASVVCLLNNFYPREAKVQWKVDNALQSGNSQESVTEQDSKDSTYSLSSTLTLSKADYEKHKVYACEVTHQGLSSPVTKSFNRGECSGGGGSEVQLVESGGGLVQPGGSLKLSCAASGFTFNKYAMNWVRQAPGKGLEWVARIRSKYNNYATYYADSVKDRFTISRDDSKNTAYLQMNNLKTEDTAVYYCVRHGNFGNSYISYWAYWGQGTLVTVSSGGGGSGGGGSGGGGSQTVVTQEPSLTVSPGGTVTLTCGSSTGAVTSGNYPNWVQQKPGQAPRGLIGGTKFLAPGTPARFSGSLLGGKAALTLSGVQPEDEAEYYCVLWYSNRWVFGGGTKLTVLGGGGDKTHTCPPCPAPELLGGPSVFLFPPKPKDTLMISRTPEVTCVVVDVSHEDPEVKFNWYVDGVEVHNAKTKPCEEQYGSTYRCVSVLTVLHQDWLNGKEYKCKVSNKALPAPIEKTISKAKGQPREPQVYTLPPSREEMTKNQVSLTCLVKGFYPSDIAVEWESNGQPENNYKTTPPVLDSDGSFFLYSKLTVDKSRWQQGNVFSCSVMHEALHNHYTQKSLSLSPGKGGGGSGGGGSGGGGSGGGGSGGGGSGGGGSDKTHTCPPCPAPELLGGPSVFLFPPKPKDTLMISRTPEVTCVVVDVSHEDPEVKFNWYVDGVEVHNAKTKPCEEQYGSTYRCVSVLTVLHQDWLNGKEYKCKVSNKALPAPIEKTISKAKGQPREPQVYTLPPSREEMTKNQVSLTCLVKGFYPSDIAVEWESNGQPENNYKTTPPVLDSDGSFFLYSKLTVDKSRWQQGNVFSCSVMHEALHNHYTQKSLSLSPGK

SEQ ID NO: 309 - protein, 5 aa, Artificial Sequence
  Synthetic Polypeptide
SHAMS

SEQ ID NO: 310 - protein, 17 aa, Artificial Sequence
  Synthetic Polypeptide
AISGSGGGTYNAASVKG

SEQ ID NO: 311 - protein, 10 aa, Artificial Sequence
  Synthetic Polypeptide
GKGVHLGFDY

SEQ ID NO: 312 - protein, 11 aa, Artificial Sequence
  Synthetic Polypeptide
GGNNIGSKSVH

SEQ ID NO: 313 - protein, 7 aa, Artificial Sequence
  Synthetic Polypeptide
DDNDRPS

SEQ ID NO: 314 - protein, 11 aa, Artificial Sequence
  Synthetic Polypeptide
QVWDYYSNRAV

SEQ ID NO: 315 - protein, 119 aa, Artificial Sequence
  Synthetic Polypeptide
EVQLLESGGGLVQPGGSLRLSCAASGFTFSSHAMSWVRQAPGKCLEWVSAISGSGGGTYNAASVKGRFTISRDNSKNTLYLQMNSLRAEDTAAYYCVTGKGVHLGFDYWGQGTLVTVSS

SEQ ID NO: 316 - protein, 108 aa, Artificial Sequence
  Synthetic Polypeptide
SYVLTQPPSVSVAPGQTARITCGGNNIGSKSVHWYQQKPGQAPVMVVYDDNDRPSGIPERFSGSNSGNTATLTISRVEAGDEADYYCQVWDYYSNRAVFGCGTKLTVL

SEQ ID NO: 317 - protein, 242 aa, Artificial Sequence
  Synthetic Polypeptide
EVQLLESGGGLVQPGGSLRLSCAASGFTFSSHAMSWVRQAPGKCLEWVSAISGSGGGTYNAASVKGRFTISRDNSKNTLYLQMNSLRAEDTAAYYCVTGKGVHLGFDYWGQGTLVTVSSGGGGSGGGGSGGGGSSYVLTQPPSVSVAPGQTARITCGGNNIGSKSVHWYQQKPGQAPVMVVYDDNDRPSGIPERFSGSNSGNTATLTISRVEAGDEADYYCQVWDYYSNRAVFGCGTKLTVL

SEQ ID NO: 318 - protein, 497 aa, Artificial Sequence
  Synthetic Polypeptide
EVQLLESGGGLVQPGGSLRLSCAASGFTFSSHAMSWVRQAPGKCLEWVSAISGSGGGTYNAASVKGRFTISRDNSKNTLYLQMNSLRAEDTAAYYCVTGKGVHLGFDYWGQGTLVTVSSGGGGSGGGGSGGGGSSYVLTQPPSVSVAPGQTARITCGGNNIGSKSVHWYQQKPGQAPVMVVYDDNDRPSGIPERFSGSNSGNTATLTISRVEAGDEADYYCQVWDYYSNRAVFGCGTKLTVLSGGGGSEVQLVESGGGLVQPGGSLKLSCAASGFTFNKYAMNWVRQAPGKGLEWVARIRSKYNNYATYYADSVKDRFTISRDDSKNTAYLQMNNLKTEDTAVYYCVRHGNFGNSYISYWAYWGQGTLVTVSSGGGGSGGGGSGGGGSQTVVTQEPSLTVSPGGTVTLTCGSSTGAVTSGNYPNWVQQKPGQAPRGLIGGTKFLAPGTPARFSGSLLGGKAALTLSGVQPEDEAEYYCVLWYSNRWVFGGGTKLTVL

SEQ ID NO: 319 - protein, 985 aa, Artificial Sequence
  Synthetic Polypeptide
EVQLLESGGGLVQPGGSLRLSCAASGFTFSSHAMSWVRQAPGKCLEWVSAISGSGGGTYNAASVKGRFTISRDNSKNTLYLQMNSLRAEDTAAYYCVTGKGVHLGFDYWGQGTLVTVSSGGGGSGGGGSGGGGSSYVLTQPPSVSVAPGQTARITCGGNNIGSKSVHWYQQKPGQAPVMVVYDDNDRPSGIPERFSGSNSGNTATLTISRVEAGDEADYYCQVWDYYSNRAVFGCGTKLTVLSGGGGSEVQLVESGGGLVQPGGSLKLSCAASGFTFNKYAMNWVRQAPGKGLEWVARIRSKYNNYATYYADSVKDRFTISRDDSKNTAYLQMNNLKTEDTAVYYCVRHGNFGNSYISYWAYWGQGTLVTVSSGGGGSGGGGSGGGGSQTVVTQEPSLTVSPGGTVTLTCGSSTGAVTSGNYPNWVQQKPGQAPRGLIGGTKFLAPGTPARFSGSLLGGKAALTLSGVQPEDEAEYYCVLWYSNRWVFGGGTKLTVLGGGGDKTHTCPPCPAPELLGGPSVFLFPPKPKDTLMISRTPEVTCVVVDVSHEDPEVKFNWYVDGVEVHNAKTKPCEEQYGSTYRCVSVLTVLHQDWLNGKEYKCKVSNKALPAPIEKTISKAKGQPREPQVYTLPPSREEMTKNQVSLTCLVKGFYPSDIAVEWESNGQPENNYKTTPPVLDSDGSFFLYSKLTVDKSRWQQGNVFSCSVMHEALHNHYTQKSLSLSPGKGGGGSGGGGSGGGGSGGGGSGGGGSGGGGSDKTHTCPPCPAPELLGGPSVFLFPPKPKDTLMISRTPEVTCVVVDVSHEDPEVKFNWYVDGVEVHNAKTKPCEEQYGSTYRCVSVLTVLHQDWLNGKEYKCKVSNKALPAPIEKTISKAKGQPREPQVYTLPPSREEMTKNQVSLTCLVKGFYPSDIAVEWESNGQPENNYKTTPPVLDSDGSFFLYSKLTVDKSRWQQGNVFSCSVMHEALHNHYTQKSLSLSPGK

SEQ ID NO: 320 - protein, 222 aa, Artificial Sequence
  Synthetic Polypeptide
EVQLLESGGGLVQPGGSLRLSCAASGFTFSSHAMSWVRQAPGKGLEWVSAISGSGGGTYNAASVKGRFTISRDNSKNTLYLQMNSLRAEDTAAYYCVTGKGVHLGFDYWGQGTLVTVSSASTKGPSVFPLAPSSKSTSGGTAALGCLVKDYFPEPVTVSWNSGALTSGVHTFPAVLQSSGLYSLSSVVTVPSSSLGTQTYICNVNHKPSNTKVDKKVEPKSC

SEQ ID NO: 321 - protein, 214 aa, Artificial Sequence
  Synthetic Polypeptide
SYVLTQPPSVSVAPGQTARITCGGNNIGSKSVHWYQQKPGQAPVMVVYDDNDRPSGIPERFSGSNSGNTATLTISRVEAGDEADYYCQVWDYYSNRAVFGGGTKLTVLGQPKAAPSVTLFPPSSEELQANKATLVCLISDFYPGAVTVAWKADSSPVKAGVETTTPSKQSNNKYAASSYLSLTPEQWKSHKSYSCQVTHEGSTVEKTVAPTECS

SEQ ID NO: 322 - protein, 476 aa, Artificial Sequence
  Synthetic Polypeptide
EVQLLESGGGLVQPGGSLRLSCAASGFTFSSHAMSWVRQAPGKGLEWVSAISGSGGGTYNAASVKGRFTISRDNSKNTLYLQMNSLRAEDTAAYYCVTGKGVHLGFDYWGQGTLVTVSSASTKGPSVFPLAPSSKSTSGGTAALGCLVKDYFPEPVTVSWNSGALTSGVHTFPAVLQSSGLYSLSSVVTVPSSSLGTQTYICNVNHKPSNTKVDKKVEPKSCGGGGSGGGGSGGGGSGGGGSGGGGSGGGGSGGGGSGGGGSSYVLTQPPSVSVAPGQTARITCGGNNIGSKSVHWYQQKPGQAPVMVVYDDNDRPSGIPERFSGSNSGNTATLTISRVEAGDEADYYCQVWDYYSNRAVFGGGTKLTVLGQPKAAPSVTLFPPSSEELQANKATLVCLISDFYPGAVTVAWKADSSPVKAGVETTTPSKQSNNKYAASSYLSLTPEQWKSHKSYSCQVTHEGSTVEKTVAPTECS

SEQ ID NO: 323 - protein, 731 aa, Artificial Sequence
  Synthetic Polypeptide
EVQLLESGGGLVQPGGSLRLSCAASGFTFSSHAMSWVRQAPGKGLEWVSAISGSGGGTYNAASVKGRFTISRDNSKNTLYLQMNSLRAEDTAAYYCVTGKGVHLGFDYWGQGTLVTVSSASTKGPSVFPLAPSSKSTSGGTAALGCLVKDYFPEPVTVSWNSGALTSGVHTFPAVLQSSGLYSLSSVVTVPSSSLGTQTYICNVNHKPSNTKVDKKVEPKSCGGGGSGGGGSGGGGSGGGGSGGGGSGGGGSGGGGSGGGGSSYVLTQPPSVSVAPGQTARITCGGNNIGSKSVHWYQQKPGQAPVMVVYDDNDRPSGIPERFSGSNSGNTATLTISRVEAGDEADYYCQVWDYYSNRAVFGGGTKLTVLGQPKAAPSVTLFPPSSEELQANKATLVCLISDFYPGAVTVAWKADSSPVKAGVETTTPSKQSNNKYAASSYLSLTPEQWKSHKSYSCQVTHEGSTVEKTVAPTECSSGGGGSEVQLVESGGGLVQPGGSLKLSCAASGFTFNKYAMNWVRQAPGKGLEWVARIRSKYNNYATYYADSVKDRFTISRDDSKNTAYLQMNNLKTEDTAVYYCVRHGNFGNSYISYWAYWGQGTLVTVSSGGGGSGGGGSGGGGSQTVVTQEPSLTVSPGGTVTLTCGSSTGAVTSGNYPNWVQQKPGQAPRGLIGGTKFLAPGTPARFSGSLLGGKAALTLSGVQPEDEAEYYCVLWYSNRWVFGGGTKLTVL

SEQ ID NO: 324 - protein, 1219 aa, Artificial Sequence
  Synthetic Polypeptide
EVQLLESGGGLVQPGGSLRLSCAASGFTFSSHAMSWVRQAPGKGLEWVSAISGSGGGTYNAASVKGRFTISRDNSKNTLYLQMNSLRAEDTAAYYCVTGKGVHLGFDYWGQGTLVTVSSASTKGPSVFPLAPSSKSTSGGTAALGCLVKDYFPEPVTVSWNSGALTSGVHTFPAVLQSSGLYSLSSVVTVPSSSLGTQTYICNVNHKPSNTKVDKKVEPKSCGGGGSGGGGSGGGGSGGGGSGGGGSGGGGSGGGGSGGGGSSYVLTQPPSVSVAPGQTARITCGGNNIGSKSVHWYQQKPGQAPVMVVYDDNDRPSGIPERFSGSNSGNTATLTISRVEAGDEADYYCQVWDYYSNRAVFGGGTKLTVLGQPKAAPSVTLFPPSSEELQANKATLVCLISDFYPGAVTVAWKADSSPVKAGVETTTPSKQSNNKYAASSYLSLTPEQWKSHKSYSCQVTHEGSTVEKTVAPTECSSGGGGSEVQLVESGGGLVQPGGSLKLSCAASGFTFNKYAMNWVRQAPGKGLEWVARIRSKYNNYATYYADSVKDRFTISRDDSKNTAYLQMNNLKTEDTAVYYCVRHGNFGNSYISYWAYWGQGTLVTVSSGGGGSGGGGSGGGGSQTVVTQEPSLTVSPGGTVTLTCGSSTGAVTSGNYPNWVQQKPGQAPRGLIGGTKFLAPGTPARFSGSLLGGKAALTLSGVQPEDEAEYYCVLWYSNRWVFGGGTKLTVLGGGGDKTHTCPPCPAPELLGGPSVFLFPPKPKDTLMISRTPEVTCVVVDVSHEDPEVKFNWYVDGVEVHNAKTKPCEEQYGSTYRCVSVLTVLHQDWLNGKEYKCKVSNKALPAPIEKTISKAKGQPREPQVYTLPPSREEMTKNQVSLTCLVKGFYPSDIAVEWESNGQPENNYKTTPPVLDSDGSFFLYSKLTVDKSRWQQGNVFSCSVMHEALHNHYTQKSLSLSPGKGGGGSGGGGSGGGGSGGGGSGGGGSGGGGSDKTHTCPPCPAPELLGGPSVFLFPPKPKDTLMISRTPEVTCVVVDVSHEDPEVKFNWYVDGVEVHNAKTKPCEEQYGSTYRCVSVLTVLHQDWLNGKEYKCKVSNKALPAPIEKTISKAKGQPREPQVYTLPPSREEMTKNQVSLTCLVKGFYPSDIAVEWESNGQPENNYKTTPPVLDSDGSFFLYSKLTVDKSRWQQGNVFSCSVMHEALHNHYTQKSLSLSPGK

SEQ ID NO: 325 - protein, 7 aa, Artificial Sequence
  Synthetic Polypeptide
THKMGVD

SEQ ID NO: 326 - protein, 16 aa, Artificial Sequence
  Synthetic Polypeptide
LIYWNDDKRYSPSLQS

SEQ ID NO: 327 - protein, 13 aa, Artificial Sequence
  Synthetic Polypeptide
RRYNWNYENWFDP

SEQ ID NO: 328 - protein, 11 aa, Artificial Sequence
  Synthetic Polypeptide
QASQDISNYLN

SEQ ID NO: 329 - protein, 7 aa, Artificial Sequence
  Synthetic Polypeptide
AASSLQS

SEQ ID NO: 330 - protein, 9 aa, Artificial Sequence
  Synthetic Polypeptide
QQSYYYPTL

SEQ ID NO: 331 - protein, 123 aa, Artificial Sequence
  Synthetic Polypeptide
QITLKESGPALVKPTQTLTLTCTFSGFSFTTHKMGVDWIRQPPGKCLEWLALIYWNDDKRYSPSLQSRLTITKDTSKNQVVLTMTNMDPVDTATYYCAYRRYNWNYENWFDPWGQGTLVTVSS

SEQ ID NO: 332 - protein, 107 aa, Artificial Sequence
  Synthetic Polypeptide
DIQMTQSPSSLSASVGDRVTITCQASQDISNYLNWYQQKPGKAPKLLIYAASSLQSGVPSRFSGRGSGTDFTLTISSLQPEDFATYYCQQSYYYPTLFGCGTKVEIK

SEQ ID NO: 333 - protein, 245 aa, Artificial Sequence
  Synthetic Polypeptide
QITLKESGPALVKPTQTLTLTCTFSGFSFTTHKMGVDWIRQPPGKCLEWLALIYWNDDKRYSPSLQSRLTITKDTSKNQVVLTMTNMDPVDTATYYCAYRRYNWNYENWFDPWGQGTLVTVSSGGGGSGGGGSGGGGSDIQMTQSPSSLSASVGDRVTITCQASQDISNYLNWYQQKPGKAPKLLIYAASSLQSGVPSRFSGRGSGTDFTLTISSLQPEDFATYYCQQSYYYPTLFGCGTKVEIK

SEQ ID NO: 334 - protein, 500 aa, Artificial Sequence
  Synthetic Polypeptide
QITLKESGPALVKPTQTLTLTCTFSGFSFTTHKMGVDWIRQPPGKCLEWLALIYWNDDKRYSPSLQSRLTITKDTSKNQVVLTMTNMDPVDTATYYCAYRRYNWNYENWFDPWGQGTLVTVSSGGGGSGGGGSGGGGSDIQMTQSPSSLSASVGDRVTITCQASQDISNYLNWYQQKPGKAPKLLIYAASSLQSGVPSRFSGRGSGTDFTLTISSLQPEDFATYYCQQSYYYPTLFGCGTKVEIKSGGGGSEVQLVESGGGLVQPGGSLKLSCAASGFTFNKYAMNWVRQAPGKGLEWVARIRSKYNNYATYYADSVKDRFTISRDDSKNTAYLQMNNLKTEDTAVYYCVRHGNFGNSYISYWAYWGQGTLVTVSSGGGGSGGGGSGGGGSQTVVTQEPSLTVSPGGTVTLTCGSSTGAVTSGNYPNWVQQKPGQAPRGLIGGTKFLAPGTPARFSGSLLGGKAALTLSGVQPEDEAEYYCVLWYSNRWVFGGGTKLTVL

SEQ ID NO: 335 - protein, 988 aa, Artificial Sequence
  Synthetic Polypeptide
QITLKESGPALVKPTQTLTLTCTFSGFSFTTHKMGVDWIRQPPGKCLEWLALIYWNDDKRYSPSLQSRLTITKDTSKNQVVLTMTNMDPVDTATYYCAYRRYNWNYENWFDPWGQGTLVTVSSGGGGSGGGGSGGGGSDIQMTQSPSSLSASVGDRVTITCQASQDISNYLNWYQQKPGKAPKLLIYAASSLQSGVPSRFSGRGSGTDFTLTISSLQPEDFATYYCQQSYYYPTLFGCGTKVEIKSGGGGSEVQLVESGGGLVQPGGSLKLSCAASGFTFNKYAMNWVRQAPGKGLEWVARIRSKYNNYATYYADSVKDRFTISRDDSKNTAYLQMNNLKTEDTAVYYCVRHGNFGNSYISYWAYWGQGTLVTVSSGGGGSGGGGSGGGGSQTVVTQEPSLTVSPGGTVTLTCGSSTGAVTSGNYPNWVQQKPGQAPRGLIGGTKFLAPGTPARFSGSLLGGKAALTLSGVQPEDEAEYYCVLWYSNRWVFGGGTKLTVLGGGGDKTHTCPPCPAPELLGGPSVFLFPPKPKDTLMISRTPEVTCVVVDVSHEDPEVKFNWYVDGVEVHNAKTKPCEEQYGSTYRCVSVLTVLHQDWLNGKEYKCKVSNKALPAPIEKTISKAKGQPREPQVYTLPPSREEMTKNQVSLTCLVKGFYPSDIAVEWESNGQPENNYKTTPPVLDSDGSFFLYSKLTVDKSRWQQGNVFSCSVMHEALHNHYTQKSLSLSPGKGGGGSGGGGSGGGGSGGGGSGGGGSGGGGSDKTHTCPPCPAPELLGGPSVFLFPPKPKDTLMISRTPEVTCVVVDVSHEDPEVKFNWYVDGVEVHNAKTKPCEEQYGSTYRCVSVLTVLHQDWLNGKEYKCKVSNKALPAPIEKTISKAKGQPREPQVYTLPPSREEMTKNQVSLTCLVKGFYPSDIAVEWESNGQPENNYKTTPPVLDSDGSFFLYSKLTVDKSRWQQGNVFSCSVMHEALHNHYTQKSLSLSPGK

SEQ ID NO: 336 - protein, 17 aa, Artificial Sequence
  Synthetic Polypeptide
  X (13)..(13): K or R
KSSQSVLYSSNNXNYLA

SEQ ID NO: 337 - protein, 226 aa, Artificial Sequence
  Synthetic Polypeptide
QITLKESGPALVKPTQTLTLTCTFSGFSFTTHKMGVDWIRQPPGKALEWLALIYWNDDKRYSPSLQSRLTITKDTSKNQVVLTMTNMDPVDTATYYCAYRRYNWNYENWFDPWGQGTLVTVSSASTKGPSVFPLAPSSKSTSGGTAALGCLVKDYFPEPVTVSWNSGALTSGVHTFPAVLQSSGLYSLSSVVTVPSSSLGTQTYICNVNHKPSNTKVDKKVEPKSC

SEQ ID NO: 338 - protein, 214 aa, Artificial Sequence
  Synthetic Polypeptide
DIQMTQSPSSLSASVGDRVTITCQASQDISNYLNWYQQKPGKAPKLLIYAASSLQSGVPSRFSGRGSGTDFTLTISSLQPEDFATYYCQQSYYYPTLFGPGTKVEIKRTVAAPSVFIFPPSDEQLKSGTASVVCLLNNFYPREAKVQWKVDNALQSGNSQESVTEQDSKDSTYSLSSTLTLSKADYEKHKVYACEVTHQGLSSPVTKSFNRGEC

SEQ ID NO: 339 - protein, 480 aa, Artificial Sequence
  Synthetic Polypeptide
QITLKESGPALVKPTQTLTLTCTFSGFSFTTHKMGVDWIRQPPGKALEWLALIYWNDDKRYSPSLQSRLTITKDTSKNQVVLTMTNMDPVDTATYYCAYRRYNWNYENWFDPWGQGTLVTVSSASTKGPSVFPLAPSSKSTSGGTAALGCLVKDYFPEPVTVSWNSGALTSGVHTFPAVLQSSGLYSLSSVVTVPSSSLGTQTYICNVNHKPSNTKVDKKVEPKSCGGGGSGGGGSGGGGSGGGGSGGGGSGGGGSGGGGSGGGGSDIQMTQSPSSLSASVGDRVTITCQASQDISNYLNWYQQKPGKAPKLLIYAASSLQSGVPSRFSGRGSGTDFTLTISSLQPEDFATYYCQQSYYYPTLFGPGTKVEIKRTVAAPSVFIFPPSDEQLKSGTASVVCLLNNFYPREAKVQWKVDNALQSGNSQESVTEQDSKDSTYSLSSTLTLSKADYEKHKVYACEVTHQGLSSPVTKSFNRGEC

SEQ ID NO: 340 - protein, 735 aa, Artificial Sequence
  Synthetic Polypeptide
QITLKESGPALVKPTQTLTLTCTFSGFSFTTHKMGVDWIRQPPGKALEWLALIYWNDDKRYSPSLQSRLTITKDTSKNQVVLTMTNMDPVDTATYYCAYRRYNWNYENWFDPWGQGTLVTVSSASTKGPSVFPLAPSSKSTSGGTAALGCLVKDYFPEPVTVSWNSGALTSGVHTFPAVLQSSGLYSLSSVVTVPSSSLGTQTYICNVNHKPSNTKVDKKVEPKSCGGGGSGGGGSGGGGSGGGGSGGGGSGGGGSGGGGSGGGGSDIQMTQSPSSLSASVGDRVTITCQASQDISNYLNWYQQKPGKAPKLLIYAASSLQSGVPSRFSGRGSGTDFTLTISSLQPEDFATYYCQQSYYYPTLFGPGTKVEIKRTVAAPSVFIFPPSDEQLKSGTASVVCLLNNFYPREAKVQWKVDNALQSGNSQESVTEQDSKDSTYSLSSTLTLSKADYEKHKVYACEVTHQGLSSPVTKSFNRGECSGGGGSEVQLVESGGGLVQPGGSLKLSCAASGFTFNKYAMNWVRQAPGKGLEWVARIRSKYNNYATYYADSVKDRFTISRDDSKNTAYLQMNNLKTEDTAVYYCVRHGNFGNSYISYWAYWGQGTLVTVSSGGGGSGGGGSGGGGSQTVVTQEPSLTVSPGGTVTLTCGSSTGAVTSGNYPNWVQQKPGQAPRGLIGGTKFLAPGTPARFSGSLLGGKAALTLSGVQPEDEAEYYCVLWYSNRWVFGGGTKLTVL

SEQ ID NO: 341 - protein, 1223 aa, Artificial Sequence
  Synthetic Polypeptide
QITLKESGPALVKPTQTLTLTCTFSGFSFTTHKMGVDWIRQPPGKALEWLALIYWNDDKRYSPSLQSRLTITKDTSKNQVVLTMTNMDPVDTATYYCAYRRYNWNYENWFDPWGQGTLVTVSSASTKGPSVFPLAPSSKSTSGGTAALGCLVKDYFPEPVTVSWNSGALTSGVHTFPAVLQSSGLYSLSSVVTVPSSSLGTQTYICNVNHKPSNTKVDKKVEPKSCGGGGSGGGGSGGGGSGGGGSGGGGSGGGGSGGGGSGGGGSDIQMTQSPSSLSASVGDRVTITCQASQDISNYLNWYQQKPGKAPKLLIYAASSLQSGVPSRFSGRGSGTDFTLTISSLQPEDFATYYCQQSYYYPTLFGPGTKVEIKRTVAAPSVFIFPPSDEQLKSGTASVVCLLNNFYPREAKVQWKVDNALQSGNSQESVTEQDSKDSTYSLSSTLTLSKADYEKHKVYACEVTHQGLSSPVTKSFNRGECSGGGGSEVQLVESGGGLVQPGGSLKLSCAASGFTFNKYAMNWVRQAPGKGLEWVARIRSKYNNYATYYADSVKDRFTISRDDSKNTAYLQMNNLKTEDTAVYYCVRHGNFGNSYISYWAYWGQGTLVTVSSGGGGSGGGGSGGGGSQTVVTQEPSLTVSPGGTVTLTCGSSTGAVTSGNYPNWVQQKPGQAPRGLIGGTKFLAPGTPARFSGSLLGGKAALTLSGVQPEDEAEYYCVLWYSNRWVFGGGTKLTVLGGGGDKTHTCPPCPAPELLGGPSVFLFPPKPKDTLMISRTPEVTCVVVDVSHEDPEVKFNWYVDGVEVHNAKTKPCEEQYGSTYRCVSVLTVLHQDWLNGKEYKCKVSNKALPAPIEKTISKAKGQPREPQVYTLPPSREEMTKNQVSLTCLVKGFYPSDIAVEWESNGQPENNYKTTPPVLDSDGSFFLYSKLTVDKSRWQQGNVFSCSVMHEALHNHYTQKSLSLSPGKGGGGSGGGGSGGGGSGGGGSGGGGSGGGGSDKTHTCPPCPAPELLGGPSVFLFPPKPKDTLMISRTPEVTCVVVDVSHEDPEVKFNWYVDGVEVHNAKTKPCEEQYGSTYRCVSVLTVLHQDWLNGKEYKCKVSNKALPAPIEKTISKAKGQPREPQVYTLPPSREEMTKNQVSLTCLVKGFYPSDIAVEWESNGQPENNYKTTPPVLDSDGSFFLYSKLTVDKSRWQQGNVFSCSVMHEALHNHYTQKSLSLSPGK

SEQ ID NO: 342 - protein, 114 aa, Artificial Sequence
  Synthetic Polypeptide
  X (36)..(36): K or R
  X (43)..(43): H or Q
  X (49)..(49): S or P
DIVMTQSPDSLAVSLGERATINCKSSQSVLYSSNNXNYLAWYXQKPGQXPKLLISWASTRESGVPDRFSGSGSGTDFTLTINSLQAEDVAVYYCQQYYSIPITFGGGTKVEIKR

SEQ ID NO: 343 - protein, 7 aa, Artificial Sequence
  Synthetic Polypeptide
THKMGVD

SEQ ID NO: 344 - protein, 16 aa, Artificial Sequence
  Synthetic Polypeptide
GIHIYDDKRYSPSLQS

SEQ ID NO: 345 - protein, 13 aa, Artificial Sequence
  Synthetic Polypeptide
RRYNWNYENWFDP

SEQ ID NO: 346 - protein, 11 aa, Artificial Sequence
  Synthetic Polypeptide
QASQDISNYFN

SEQ ID NO: 347 - protein, 7 aa, Artificial Sequence
  Synthetic Polypeptide
AASSLQS

SEQ ID NO: 348 - protein, 9 aa, Artificial Sequence
  Synthetic Polypeptide
QQSYITPFT

SEQ ID NO: 349 - protein, 123 aa, Artificial Sequence
  Synthetic Polypeptide
QITLKESGPTLVKPTQTLTLTCTFSGFSFTTHKMGVDWIRQPPGKCLEWLAGIHIYDDKRYSPSLQSRLTITKDTSKNQVVLTMTNMDPVDTATYYCAYRRYNWNYENWFDPWGQGTLVTVSS

SEQ ID NO: 350 - protein, 107 aa, Artificial Sequence
  Synthetic Polypeptide
DIQMTQSPSSLSASVGDRVTITCQASQDISNYFNWYQQKPGKAPKLLIYAASSLQSGVPSRFSGSGSGTDFTLTISSLQPEDFATYYCQQSYITPFTFGCGTKVEIK

SEQ ID NO: 351 - protein, 245 aa, Artificial Sequence
  Synthetic Polypeptide
QITLKESGPTLVKPTQTLTLTCTFSGFSFTTHKMGVDWIRQPPGKCLEWLAGIHIYDDKRYSPSLQSRLTITKDTSKNQVVLTMTNMDPVDTATYYCAYRRYNWNYENWFDPWGQGTLVTVSSGGGGSGGGGSGGGGSDIQMTQSPSSLSASVGDRVTITCQASQDISNYFNWYQQKPGKAPKLLIYAASSLQSGVPSRFSGSGSGTDFTLTISSLQPEDFATYYCQQSYITPFTFGCGTKVEIK

SEQ ID NO: 352 - protein, 500 aa, Artificial Sequence
  Synthetic Polypeptide
QITLKESGPTLVKPTQTLTLTCTFSGFSFTTHKMGVDWIRQPPGKCLEWLAGIHIYDDKRYSPSLQSRLTITKDTSKNQVVLTMTNMDPVDTATYYCAYRRYNWNYENWFDPWGQGTLVTVSSGGGGSGGGGSGGGGSDIQMTQSPSSLSASVGDRVTITCQASQDISNYFNWYQQKPGKAPKLLIYAASSLQSGVPSRFSGSGSGTDFTLTISSLQPEDFATYYCQQSYITPFTFGCGTKVEIKSGGGGSEVQLVESGGGLVQPGGSLKLSCAASGFTFNKYAMNWVRQAPGKGLEWVARIRSKYNNYATYYADSVKDRFTISRDDSKNTAYLQMNNLKTEDTAVYYCVRHGNFGNSYISYWAYWGQGTLVTVSSGGGGSGGGGSGGGGSQTVVTQEPSLTVSPGGTVTLTCGSSTGAVTSGNYPNWVQQKPGQAPRGLIGGTKFLAPGTPARFSGSLLGGKAALTLSGVQPEDEAEYYCVLWYSNRWVFGGGTKLTVL

SEQ ID NO: 353 - protein, 988 aa, Artificial Sequence
  Synthetic Polypeptide
QITLKESGPTLVKPTQTLTLTCTFSGFSFTTHKMGVDWIRQPPGKCLEWLAGIHIYDDKRYSPSLQSRLTITKDTSKNQVVLTMTNMDPVDTATYYCAYRRYNWNYENWFDPWGQGTLVTVSSGGGGSGGGGSGGGGSDIQMTQSPSSLSASVGDRVTITCQASQDISNYFNWYQQKPGKAPKLLIYAASSLQSGVPSRFSGSGSGTDFTLTISSLQPEDFATYYCQQSYITPFTFGCGTKVEIKSGGGGSEVQLVESGGGLVQPGGSLKLSCAASGFTFNKYAMNWVRQAPGKGLEWVARIRSKYNNYATYYADSVKDRFTISRDDSKNTAYLQMNNLKTEDTAVYYCVRHGNFGNSYISYWAYWGQGTLVTVSSGGGGSGGGGSGGGGSQTVVTQEPSLTVSPGGTVTLTCGSSTGAVTSGNYPNWVQQKPGQAPRGLIGGTKFLAPGTPARFSGSLLGGKAALTLSGVQPEDEAEYYCVLWYSNRWVFGGGTKLTVLGGGGDKTHTCPPCPAPELLGGPSVFLFPPKPKDTLMISRTPEVTCVVVDVSHEDPEVKFNWYVDGVEVHNAKTKPCEEQYGSTYRCVSVLTVLHQDWLNGKEYKCKVSNKALPAPIEKTISKAKGQPREPQVYTLPPSREEMTKNQVSLTCLVKGFYPSDIAVEWESNGQPENNYKTTPPVLDSDGSFFLYSKLTVDKSRWQQGNVFSCSVMHEALHNHYTQKSLSLSPGKGGGGSGGGGSGGGGSGGGGSGGGGSGGGGSDKTHTCPPCPAPELLGGPSVFLFPPKPKDTLMISRTPEVTCVVVDVSHEDPEVKFNWYVDGVEVHNAKTKPCEEQYGSTYRCVSVLTVLHQDWLNGKEYKCKVSNKALPAPIEKTISKAKGQPREPQVYTLPPSREEMTKNQVSLTCLVKGFYPSDIAVEWESNGQPENNYKTTPPVLDSDGSFFLYSKLTVDKSRWQQGNVFSCSVMHEALHNHYTQKSLSLSPGK

SEQ ID NO: 354 - protein, 226 aa, Artificial Sequence
  Synthetic Polypeptide
QITLKESGPTLVKPTQTLTLTCTFSGFSFTTHKMGVDWIRQPPGKALEWLAGIHIYDDKRYSPSLQSRLTITKDTSKNQVVLTMTNMDPVDTATYYCAYRRYNWNYENWFDPWGQGTLVTVSSASTKGPSVFPLAPSSKSTSGGTAALGCLVKDYFPEPVTVSWNSGALTSGVHTFPAVLQSSGLYSLSSVVTVPSSSLGTQTYICNVNHKPSNTKVDKKVEPKSC

SEQ ID NO: 355 - protein, 214 aa, Artificial Sequence
  Synthetic Polypeptide
DIQMTQSPSSLSASVGDRVTITCQASQDISNYFNWYQQKPGKAPKLLIYAASSLQSGVPSRFSGSGSGTDFTLTISSLQPEDFATYYCQQSYITPFTFGPGTKVEIKRTVAAPSVFIFPPSDEQLKSGTASVVCLLNNFYPREAKVQWKVDNALQSGNSQESVTEQDSKDSTYSLSSTLTLSKADYEKHKVYACEVTHQGLSSPVTKSFNRGEC

SEQ ID NO: 356 - protein, 480 aa, Artificial Sequence
  Synthetic Polypeptide
QITLKESGPTLVKPTQTLTLTCTFSGFSFTTHKMGVDWIRQPPGKALEWLAGIHIYDDKRYSPSLQSRLTITKDTSKNQVVLTMTNMDPVDTATYYCAYRRYNWNYENWFDPWGQGTLVTVSSASTKGPSVFPLAPSSKSTSGGTAALGCLVKDYFPEPVTVSWNSGALTSGVHTFPAVLQSSGLYSLSSVVTVPSSSLGTQTYICNVNHKPSNTKVDKKVEPKSCGGGGSGGGGSGGGGSGGGGSGGGGSGGGGSGGGGSGGGGSDIQMTQSPSSLSASVGDRVTITCQASQDISNYFNWYQQKPGKAPKLLIYAASSLQSGVPSRFSGSGSGTDFTLTISSLQPEDFATYYCQQSYITPFTFGPGTKVEIKRTVAAPSVFIFPPSDEQLKSGTASVVCLLNNFYPREAKVQWKVDNALQSGNSQESVTEQDSKDSTYSLSSTLTLSKADYEKHKVYACEVTHQGLSSPVTKSFNRGEC

SEQ ID NO: 357 - protein, 735 aa, Artificial Sequence
  Synthetic Polypeptide
QITLKESGPTLVKPTQTLTLTCTFSGFSFTTHKMGVDWIRQPPGKALEWLAGIHIYDDKRYSPSLQSRLTITKDTSKNQVVLTMTNMDPVDTATYYCAYRRYNWNYENWFDPWGQGTLVTVSSASTKGPSVFPLAPSSKSTSGGTAALGCLVKDYFPEPVTVSWNSGALTSGVHTFPAVLQSSGLYSLSSVVTVPSSSLGTQTYICNVNHKPSNTKVDKKVEPKSCGGGGSGGGGSGGGGSGGGGSGGGGSGGGGSGGGGSGGGGSDIQMTQSPSSLSASVGDRVTITCQASQDISNYFNWYQQKPGKAPKLLIYAASSLQSGVPSRFSGSGSGTDFTLTISSLQPEDFATYYCQQSYITPFTFGPGTKVEIKRTVAAPSVFIFPPSDEQLKSGTASVVCLLNNFYPREAKVQWKVDNALQSGNSQESVTEQDSKDSTYSLSSTLTLSKADYEKHKVYACEVTHQGLSSPVTKSFNRGECSGGGGSEVQLVESGGGLVQPGGSLKLSCAASGFTFNKYAMNWVRQAPGKGLEWVARIRSKYNNYATYYADSVKDRFTISRDDSKNTAYLQMNNLKTEDTAVYYCVRHGNFGNSYISYWAYWGQGTLVTVSSGGGGSGGGGSGGGGSQTVVTQEPSLTVSPGGTVTLTCGSSTGAVTSGNYPNWVQQKPGQAPRGLIGGTKFLAPGTPARFSGSLLGGKAALTLSGVQPEDEAEYYCVLWYSNRWVFGGGTKLTVL

SEQ ID NO: 358 - protein, 1223 aa, Artificial Sequence
  Synthetic Polypeptide
QITLKESGPTLVKPTQTLTLTCTFSGFSFTTHKMGVDWIRQPPGKALEWLAGIHIYDDKRYSPSLQSRLTITKDTSKNQVVLTMTNMDPVDTATYYCAYRRYNWNYENWFDPWGQGTLVTVSSASTKGPSVFPLAPSSKSTSGGTAALGCLVKDYFPEPVTVSWNSGALTSGVHTFPAVLQSSGLYSLSSVVTVPSSSLGTQTYICNVNHKPSNTKVDKKVEPKSCGGGGSGGGGSGGGGSGGGGSGGGGSGGGGSGGGGSGGGGSDIQMTQSPSSLSASVGDRVTITCQASQDISNYFNWYQQKPGKAPKLLIYAASSLQSGVPSRFSGSGSGTDFTLTISSLQPEDFATYYCQQSYITPFTFGPGTKVEIKRTVAAPSVFIFPPSDEQLKSGTASVVCLLNNFYPREAKVQWKVDNALQSGNSQESVTEQDSKDSTYSLSSTLTLSKADYEKHKVYACEVTHQGLSSPVTKSFNRGECSGGGGSEVQLVESGGGLVQPGGSLKLSCAASGFTFNKYAMNWVRQAPGKGLEWVARIRSKYNNYATYYADSVKDRFTISRDDSKNTAYLQMNNLKTEDTAVYYCVRHGNFGNSYISYWAYWGQGTLVTVSSGGGGSGGGGSGGGGSQTVVTQEPSLTVSPGGTVTLTCGSSTGAVTSGNYPNWVQQKPGQAPRGLIGGTKFLAPGTPARFSGSLLGGKAALTLSGVQPEDEAEYYCVLWYSNRWVFGGGTKLTVLGGGGDKTHTCPPCPAPELLGGPSVFLFPPKPKDTLMISRTPEVTCVVVDVSHEDPEVKFNWYVDGVEVHNAKTKPCEEQYGSTYRCVSVLTVLHQDWLNGKEYKCKVSNKALPAPIEKTISKAKGQPREPQVYTLPPSREEMTKNQVSLTCLVKGFYPSDIAVEWESNGQPENNYKTTPPVLDSDGSFFLYSKLTVDKSRWQQGNVFSCSVMHEALHNHYTQKSLSLSPGKGGGGSGGGGSGGGGSGGGGSGGGGSGGGGSDKTHTCPPCPAPELLGGPSVFLFPPKPKDTLMISRTPEVTCVVVDVSHEDPEVKFNWYVDGVEVHNAKTKPCEEQYGSTYRCVSVLTVLHQDWLNGKEYKCKVSNKALPAPIEKTISKAKGQPREPQVYTLPPSREEMTKNQVSLTCLVKGFYPSDIAVEWESNGQPENNYKTTPPVLDSDGSFFLYSKLTVDKSRWQQGNVFSCSVMHEALHNHYTQKSLSLSPGK

SEQ ID NO: 359 - protein, 7 aa, Artificial Sequence
  Synthetic Polypeptide
THKMGVD

SEQ ID NO: 360 - protein, 16 aa, Artificial Sequence
  Synthetic Polypeptide
LIYWNDDKRYSPSLQS

SEQ ID NO: 361 - protein, 13 aa, Artificial Sequence
  Synthetic Polypeptide
RRYNWNYENWFDP

SEQ ID NO: 362 - protein, 11 aa, Artificial Sequence
  Synthetic Polypeptide
QASQDISNYLN

SEQ ID NO: 363 - protein, 7 aa, Artificial Sequence
  Synthetic Polypeptide
AASSLQS

SEQ ID NO: 364 - protein, 9 aa, Artificial Sequence
  Synthetic Polypeptide
QQSYFPVVE

SEQ ID NO: 365 - protein, 123 aa, Artificial Sequence; identical to SEQ ID NO: 331
  Synthetic Polypeptide

SEQ ID NO: 366 - protein, 107 aa, Artificial Sequence
  Synthetic Polypeptide
DIQMTQSPSSLSASVGDRVTITCQASQDISNYLNWYQQKPGKAPKLLIYAASSLQSGVPSRFSGSGSGTDFTLTISSLQPEDFATYYCQQSYFPVVEFGCGTKVEIK

SEQ ID NO: 367 - protein, 245 aa, Artificial Sequence
  Synthetic Polypeptide
QITLKESGPALVKPTQTLTLTCTFSGFSFTTHKMGVDWIRQPPGKCLEWLALIYWNDDKRYSPSLQSRLTITKDTSKNQVVLTMTNMDPVDTATYYCAYRRYNWNYENWFDPWGQGTLVTVSSGGGGSGGGGSGGGGSDIQMTQSPSSLSASVGDRVTITCQASQDISNYLNWYQQKPGKAPKLLIYAASSLQSGVPSRFSGSGSGTDFTLTISSLQPEDFATYYCQQSYFPVVEFGCGTKVEIK

SEQ ID NO: 368 - protein, 500 aa, Artificial Sequence
  Synthetic Polypeptide
QITLKESGPALVKPTQTLTLTCTFSGFSFTTHKMGVDWIRQPPGKCLEWLALIYWNDDKRYSPSLQSRLTITKDTSKNQVVLTMTNMDPVDTATYYCAYRRYNWNYENWFDPWGQGTLVTVSSGGGGSGGGGSGGGGSDIQMTQSPSSLSASVGDRVTITCQASQDISNYLNWYQQKPGKAPKLLIYAASSLQSGVPSRFSGSGSGTDFTLTISSLQPEDFATYYCQQSYFPVVEFGCGTKVEIKSGGGGSEVQLVESGGGLVQPGGSLKLSCAASGFTFNKYAMNWVRQAPGKGLEWVARIRSKYNNYATYYADSVKDRFTISRDDSKNTAYLQMNNLKTEDTAVYYCVRHGNFGNSYISYWAYWGQGTLVTVSSGGGGSGGGGSGGGGSQTVVTQEPSLTVSPGGTVTLTCGSSTGAVTSGNYPNWVQQKPGQAPRGLIGGTKFLAPGTPARFSGSLLGGKAALTLSGVQPEDEAEYYCVLWYSNRWVFGGGTKLTVL

SEQ ID NO: 369 - protein, 988 aa, Artificial Sequence
  Synthetic Polypeptide
QITLKESGPALVKPTQTLTLTCTFSGFSFTTHKMGVDWIRQPPGKCLEWLALIYWNDDKRYSPSLQSRLTITKDTSKNQVVLTMTNMDPVDTATYYCAYRRYNWNYENWFDPWGQGTLVTVSSGGGGSGGGGSGGGGSDIQMTQSPSSLSASVGDRVTITCQASQDISNYLNWYQQKPGKAPKLLIYAASSLQSGVPSRFSGSGSGTDFTLTISSLQPEDFATYYCQQSYFPVVEFGCGTKVEIKSGGGGSEVQLVESGGGLVQPGGSLKLSCAASGFTFNKYAMNWVRQAPGKGLEWVARIRSKYNNYATYYADSVKDRFTISRDDSKNTAYLQMNNLKTEDTAVYYCVRHGNFGNSYISYWAYWGQGTLVTVSSGGGGSGGGGSGGGGSQTVVTQEPSLTVSPGGTVTLTCGSSTGAVTSGNYPNWVQQKPGQAPRGLIGGTKFLAPGTPARFSGSLLGGKAALTLSGVQPEDEAEYYCVLWYSNRWVFGGGTKLTVLGGGGDKTHTCPPCPAPELLGGPSVFLFPPKPKDTLMISRTPEVTCVVVDVSHEDPEVKFNWYVDGVEVHNAKTKPCEEQYGSTYRCVSVLTVLHQDWLNGKEYKCKVSNKALPAPIEKTISKAKGQPREPQVYTLPPSREEMTKNQVSLTCLVKGFYPSDIAVEWESNGQPENNYKTTPPVLDSDGSFFLYSKLTVDKSRWQQGNVFSCSVMHEALHNHYTQKSLSLSPGKGGGGSGGGGSGGGGSGGGGSGGGGSGGGGSDKTHTCPPCPAPELLGGPSVFLFPPKPKDTLMISRTPEVTCVVVDVSHEDPEVKFNWYVDGVEVHNAKTKPCEEQYGSTYRCVSVLTVLHQDWLNGKEYKCKVSNKALPAPIEKTISKAKGQPREPQVYTLPPSREEMTKNQVSLTCLVKGFYPSDIAVEWESNGQPENNYKTTPPVLDSDGSFFLYSKLTVDKSRWQQGNVFSCSVMHEALHNHYTQKSLSLSPGK

SEQ ID NO: 370 - protein, 226 aa, Artificial Sequence; identical to SEQ ID NO: 337
  Synthetic Polypeptide

SEQ ID NO: 371 - protein, 214 aa, Artificial Sequence
  Synthetic Polypeptide
DIQMTQSPSSLSASVGDRVTITCQASQDISNYLNWYQQKPGKAPKLLIYAASSLQSGVPSRFSGSGSGTDFTLTISSLQPEDFATYYCQQSYFPVVEFGPGTKVEIKRTVAAPSVFIFPPSDEQLKSGTASVVCLLNNFYPREAKVQWKVDNALQSGNSQESVTEQDSKDSTYSLSSTLTLSKADYEKHKVYACEVTHQGLSSPVTKSFNRGEC

SEQ ID NO: 372 - protein, 480 aa, Artificial Sequence
  Synthetic Polypeptide
QITLKESGPALVKPTQTLTLTCTFSGFSFTTHKMGVDWIRQPPGKALEWLALIYWNDDKRYSPSLQSRLTITKDTSKNQVVLTMTNMDPVDTATYYCAYRRYNWNYENWFDPWGQGTLVTVSSASTKGPSVFPLAPSSKSTSGGTAALGCLVKDYFPEPVTVSWNSGALTSGVHTFPAVLQSSGLYSLSSVVTVPSSSLGTQTYICNVNHKPSNTKVDKKVEPKSCGGGGSGGGGSGGGGSGGGGSGGGGSGGGGSGGGGSGGGGSDIQMTQSPSSLSASVGDRVTITCQASQDISNYLNWYQQKPGKAPKLLIYAASSLQSGVPSRFSGSGSGTDFTLTISSLQPEDFATYYCQQSYFPVVEFGPGTKVEIKRTVAAPSVFIFPPSDEQLKSGTASVVCLLNNFYPREAKVQWKVDNALQSGNSQESVTEQDSKDSTYSLSSTLTLSKADYEKHKVYACEVTHQGLSSPVTKSFNRGEC

SEQ ID NO: 373 - protein, 735 aa, Artificial Sequence
  Synthetic Polypeptide
QITLKESGPALVKPTQTLTLTCTFSGFSFTTHKMGVDWIRQPPGKALEWLALIYWNDDKRYSPSLQSRLTITKDTSKNQVVLTMTNMDPVDTATYYCAYRRYNWNYENWFDPWGQGTLVTVSSASTKGPSVFPLAPSSKSTSGGTAALGCLVKDYFPEPVTVSWNSGALTSGVHTFPAVLQSSGLYSLSSVVTVPSSSLGTQTYICNVNHKPSNTKVDKKVEPKSCGGGGSGGGGSGGGGSGGGGSGGGGSGGGGSGGGGSGGGGSDIQMTQSPSSLSASVGDRVTITCQASQDISNYLNWYQQKPGKAPKLLIYAASSLQSGVPSRFSGSGSGTDFTLTISSLQPEDFATYYCQQSYFPVVEFGPGTKVEIKRTVAAPSVFIFPPSDEQLKSGTASVVCLLNNFYPREAKVQWKVDNALQSGNSQESVTEQDSKDSTYSLSSTLTLSKADYEKHKVYACEVTHQGLSSPVTKSFNRGECSGGGGSEVQLVESGGGLVQPGGSLKLSCAASGFTFNKYAMNWVRQAPGKGLEWVARIRSKYNNYATYYADSVKDRFTISRDDSKNTAYLQMNNLKTEDTAVYYCVRHGNFGNSYISYWAYWGQGTLVTVSSGGGGSGGGGSGGGGSQTVVTQEPSLTVSPGGTVTLTCGSSTGAVTSGNYPNWVQQKPGQAPRGLIGGTKFLAPGTPARFSGSLLGGKAALTLSGVQPEDEAEYYCVLWYSNRWVFGGGTKLTVL

SEQ ID NO: 374 - protein, 1223 aa, Artificial Sequence
  Synthetic Polypeptide
QITLKESGPALVKPTQTLTLTCTFSGFSFTTHKMGVDWIRQPPGKALEWLALIYWNDDKRYSPSLQSRLTITKDTSKNQVVLTMTNMDPVDTATYYCAYRRYNWNYENWFDPWGQGTLVTVSSASTKGPSVFPLAPSSKSTSGGTAALGCLVKDYFPEPVTVSWNSGALTSGVHTFPAVLQSSGLYSLSSVVTVPSSSLGTQTYICNVNHKPSNTKVDKKVEPKSCGGGGSGGGGSGGGGSGGGGSGGGGSGGGGSGGGGSGGGGSDIQMTQSPSSLSASVGDRVTITCQASQDISNYLNWYQQKPGKAPKLLIYAASSLQSGVPSRFSGSGSGTDFTLTISSLQPEDFATYYCQQSYFPVVEFGPGTKVEIKRTVAAPSVFIFPPSDEQLKSGTASVVCLLNNFYPREAKVQWKVDNALQSGNSQESVTEQDSKDSTYSLSSTLTLSKADYEKHKVYACEVTHQGLSSPVTKSFNRGECSGGGGSEVQLVESGGGLVQPGGSLKLSCAASGFTFNKYAMNWVRQAPGKGLEWVARIRSKYNNYATYYADSVKDRFTISRDDSKNTAYLQMNNLKTEDTAVYYCVRHGNFGNSYISYWAYWGQGTLVTVSSGGGGSGGGGSGGGGSQTVVTQEPSLTVSPGGTVTLTCGSSTGAVTSGNYPNWVQQKPGQAPRGLIGGTKFLAPGTPARFSGSLLGGKAALTLSGVQPEDEAEYYCVLWYSNRWVFGGGTKLTVLGGGGDKTHTCPPCPAPELLGGPSVFLFPPKPKDTLMISRTPEVTCVVVDVSHEDPEVKFNWYVDGVEVHNAKTKPCEEQYGSTYRCVSVLTVLHQDWLNGKEYKCKVSNKALPAPIEKTISKAKGQPREPQVYTLPPSREEMTKNQVSLTCLVKGFYPSDIAVEWESNGQPENNYKTTPPVLDSDGSFFLYSKLTVDKSRWQQGNVFSCSVMHEALHNHYTQKSLSLSPGKGGGGSGGGGSGGGGSGGGGSGGGGSGGGGSDKTHTCPPCPAPELLGGPSVFLFPPKPKDTLMISRTPEVTCVVVDVSHEDPEVKFNWYVDGVEVHNAKTKPCEEQYGSTYRCVSVLTVLHQDWLNGKEYKCKVSNKALPAPIEKTISKAKGQPREPQVYTLPPSREEMTKNQVSLTCLVKGFYPSDIAVEWESNGQPENNYKTTPPVLDSDGSFFLYSKLTVDKSRWQQGNVFSCSVMHEALHNHYTQKSLSLSPGK

SEQ ID NO: 375 - protein, 7 aa, Artificial Sequence
  Synthetic Polypeptide
THKMGVD

SEQ ID NO: 376 - protein, 16 aa, Artificial Sequence
  Synthetic Polypeptide
LIYWNDDKRYSPSLQS

SEQ ID NO: 377 - protein, 13 aa, Artificial Sequence
  Synthetic Polypeptide
RRYNWNYENWFDP

SEQ ID NO: 378 - protein, 11 aa, Artificial Sequence
  Synthetic Polypeptide
QASQDISNYLN

SEQ ID NO: 379 - protein, 7 aa, Artificial Sequence
  Synthetic Polypeptide
AASSLQS

SEQ ID NO: 380 - protein, 9 aa, Artificial Sequence
  Synthetic Polypeptide
QQSYTPPTT

SEQ ID NO: 381 - protein, 123 aa, Artificial Sequence
  Synthetic Polypeptide
QITLKESGPTLVKPTQTLTLTCTFSGFSFTTHKMGVDWIRQPPGKCLEWLALIYWNDDKRYSPSLQSRLTITKDTSKNQVVLTMTNMDPVDTATYYCAYRRYNWNYENWFDPWGQGTLVTVSS

SEQ ID NO: 382 - protein, 107 aa, Artificial Sequence
  Synthetic Polypeptide
DIQMTQSPSSLSASVGDRVTITCQASQDISNYLNWYQQKPGKAPKLLIYAASSLQSGVPSRFSGRGSGTDFTLTISSLQPEDFATYYCQQSYTPPTTFGCGTKVEIK

SEQ ID NO: 383 - protein, 245 aa, Artificial Sequence
  Synthetic Polypeptide
QITLKESGPTLVKPTQTLTLTCTFSGFSFTTHKMGVDWIRQPPGKCLEWLALIYWNDDKRYSPSLQSRLTITKDTSKNQVVLTMTNMDPVDTATYYCAYRRYNWNYENWFDPWGQGTLVTVSSGGGGSGGGGSGGGGSDIQMTQSPSSLSASVGDRVTITCQASQDISNYLNWYQQKPGKAPKLLIYAASSLQSGVPSRFSGRGSGTDFTLTISSLQPEDFATYYCQQSYTPPTTFGCGTKVEIK

SEQ ID NO: 384 - protein, 500 aa, Artificial Sequence
  Synthetic Polypeptide
QITLKESGPTLVKPTQTLTLTCTFSGFSFTTHKMGVDWIRQPPGKCLEWLALIYWNDDKRYSPSLQSRLTITKDTSKNQVVLTMTNMDPVDTATYYCAYRRYNWNYENWFDPWGQGTLVTVSSGGGGSGGGGSGGGGSDIQMTQSPSSLSASVGDRVTITCQASQDISNYLNWYQQKPGKAPKLLIYAASSLQSGVPSRFSGRGSGTDFTLTISSLQPEDFATYYCQQSYTPPTTFGCGTKVEIKSGGGGSEVQLVESGGGLVQPGGSLKLSCAASGFTFNKYAMNWVRQAPGKGLEWVARIRSKYNNYATYYADSVKDRFTISRDDSKNTAYLQMNNLKTEDTAVYYCVRHGNFGNSYISYWAYWGQGTLVTVSSGGGGSGGGGSGGGGSQTVVTQEPSLTVSPGGTVTLTCGSSTGAVTSGNYPNWVQQKPGQAPRGLIGGTKFLAPGTPARFSGSLLGGKAALTLSGVQPEDEAEYYCVLWYSNRWVFGGGTKLTVL

SEQ ID NO: 385 - protein, 988 aa, Artificial Sequence
  Synthetic Polypeptide
QITLKESGPTLVKPTQTLTLTCTFSGFSFTTHKMGVDWIRQPPGKCLEWLALIYWNDDKRYSPSLQSRLTITKDTSKNQVVLTMTNMDPVDTATYYCAYRRYNWNYENWFDPWGQGTLVTVSSGGGGSGGGGSGGGGSDIQMTQSPSSLSASVGDRVTITCQASQDISNYLNWYQQKPGKAPKLLIYAASSLQSGVPSRFSGRGSGTDFTLTISSLQPEDFATYYCQQSYTPPTTFGCGTKVEIKSGGGGSEVQLVESGGGLVQPGGSLKLSCAASGFTFNKYAMNWVRQAPGKGLEWVARIRSKYNNYATYYADSVKDRFTISRDDSKNTAYLQMNNLKTEDTAVYYCVRHGNFGNSYISYWAYWGQGTLVTVSSGGGGSGGGGSGGGGSQTVVTQEPSLTVSPGGTVTLTCGSSTGAVTSGNYPNWVQQKPGQAPRGLIGGTKFLAPGTPARFSGSLLGGKAALTLSGVQPEDEAEYYCVLWYSNRWVFGGGTKLTVLGGGGDKTHTCPPCPAPELLGGPSVFLFPPKPKDTLMISRTPEVTCVVVDVSHEDPEVKFNWYVDGVEVHNAKTKPCEEQYGSTYRCVSVLTVLHQDWLNGKEYKCKVSNKALPAPIEKTISKAKGQPREPQVYTLPPSREEMTKNQVSLTCLVKGFYPSDIAVEWESNGQPENNYKTTPPVLDSDGSFFLYSKLTVDKSRWQQGNVFSCSVMHEALHNHYTQKSLSLSPGKGGGGSGGGGSGGGGSGGGGSGGGGSGGGGSDKTHTCPPCPAPELLGGPSVFLFPPKPKDTLMISRTPEVTCVVVDVSHEDPEVKFNWYVDGVEVHNAKTKPCEEQYGSTYRCVSVLTVLHQDWLNGKEYKCKVSNKALPAPIEKTISKAKGQPREPQVYTLPPSREEMTKNQVSLTCLVKGFYPSDIAVEWESNGQPENNYKTTPPVLDSDGSFFLYSKLTVDKSRWQQGNVFSCSVMHEALHNHYTQKSLSLSPGK

SEQ ID NO: 386 - protein, 226 aa, Artificial Sequence
  Synthetic Polypeptide
QITLKESGPTLVKPTQTLTLTCTFSGFSFTTHKMGVDWIRQPPGKALEWLALIYWNDDKRYSPSLQSRLTITKDTSKNQVVLTMTNMDPVDTATYYCAYRRYNWNYENWFDPWGQGTLVTVSSASTKGPSVFPLAPSSKSTSGGTAALGCLVKDYFPEPVTVSWNSGALTSGVHTFPAVLQSSGLYSLSSVVTVPSSSLGTQTYICNVNHKPSNTKVDKKVEPKSC

SEQ ID NO: 387 - protein, 214 aa, Artificial Sequence
  Synthetic Polypeptide
DIQMTQSPSSLSASVGDRVTITCQASQDISNYLNWYQQKPGKAPKLLIYAASSLQSGVPSRFSGRGSGTDFTLTISSLQPEDFATYYCQQSYTPPTTFGPGTKVEIKRTVAAPSVFIFPPSDEQLKSGTASVVCLLNNFYPREAKVQWKVDNALQSGNSQESVTEQDSKDSTYSLSSTLTLSKADYEKHKVYACEVTHQGLSSPVTKSFNRGEC

SEQ ID NO: 388 - protein, 480 aa, Artificial Sequence
  Synthetic Polypeptide
QITLKESGPTLVKPTQTLTLTCTFSGFSFTTHKMGVDWIRQPPGKALEWLALIYWNDDKRYSPSLQSRLTITKDTSKNQVVLTMTNMDPVDTATYYCAYRRYNWNYENWFDPWGQGTLVTVSSASTKGPSVFPLAPSSKSTSGGTAALGCLVKDYFPEPVTVSWNSGALTSGVHTFPAVLQSSGLYSLSSVVTVPSSSLGTQTYICNVNHKPSNTKVDKKVEPKSCGGGGSGGGGSGGGGSGGGGSGGGGSGGGGSGGGGSGGGGSDIQMTQSPSSLSASVGDRVTITCQASQDISNYLNWYQQKPGKAPKLLIYAASSLQSGVPSRFSGRGSGTDFTLTISSLQPEDFATYYCQQSYTPPTTFGPGTKVEIKRTVAAPSVFIFPPSDEQLKSGTASVVCLLNNFYPREAKVQWKVDNALQSGNSQESVTEQDSKDSTYSLSSTLTLSKADYEKHKVYACEVTHQGLSSPVTKSFNRGEC

SEQ ID NO: 389 - protein, 735 aa, Artificial Sequence
  Synthetic Polypeptide
QITLKESGPTLVKPTQTLTLTCTFSGFSFTTHKMGVDWIRQPPGKALEWLALIYWNDDKRYSPSLQSRLTITKDTSKNQVVLTMTNMDPVDTATYYCAYRRYNWNYENWFDPWGQGTLVTVSSASTKGPSVFPLAPSSKSTSGGTAALGCLVKDYFPEPVTVSWNSGALTSGVHTFPAVLQSSGLYSLSSVVTVPSSSLGTQTYICNVNHKPSNTKVDKKVEPKSCGGGGSGGGGSGGGGSGGGGSGGGGSGGGGSGGGGSGGGGSDIQMTQSPSSLSASVGDRVTITCQASQDISNYLNWYQQKPGKAPKLLIYAASSLQSGVPSRFSGRGSGTDFTLTISSLQPEDFATYYCQQSYTPPTTFGPGTKVEIKRTVAAPSVFIFPPSDEQLKSGTASVVCLLNNFYPREAKVQWKVDNALQSGNSQESVTEQDSKDSTYSLSSTLTLSKADYEKHKVYACEVTHQGLSSPVTKSFNRGECSGGGGSEVQLVESGGGLVQPGGSLKLSCAASGFTFNKYAMNWVRQAPGKGLEWVARIRSKYNNYATYYADSVKDRFTISRDDSKNTAYLQMNNLKTEDTAVYYCVRHGNFGNSYISYWAYWGQGTLVTVSSGGGGSGGGGSGGGGSQTVVTQEPSLTVSPGGTVTLTCGSSTGAVTSGNYPNWVQQKPGQAPRGLIGGTKFLAPGTPARFSGSLLGGKAALTLSGVQPEDEAEYYCVLWYSNRWVFGGGTKLTVL

SEQ ID NO: 390 - protein, 1223 aa, Artificial Sequence
  Synthetic Polypeptide
QITLKESGPTLVKPTQTLTLTCTFSGFSFTTHKMGVDWIRQPPGKALEWLALIYWNDDKRYSPSLQSRLTITKDTSKNQVVLTMTNMDPVDTATYYCAYRRYNWNYENWFDPWGQGTLVTVSSASTKGPSVFPLAPSSKSTSGGTAALGCLVKDYFPEPVTVSWNSGALTSGVHTFPAVLQSSGLYSLSSVVTVPSSSLGTQTYICNVNHKPSNTKVDKKVEPKSCGGGGSGGGGSGGGGSGGGGSGGGGSGGGGSGGGGSGGGGSDIQMTQSPSSLSASVGDRVTITCQASQDISNYLNWYQQKPGKAPKLLIYAASSLQSGVPSRFSGRGSGTDFTLTISSLQPEDFATYYCQQSYTPPTTFGPGTKVEIKRTVAAPSVFIFPPSDEQLKSGTASVVCLLNNFYPREAKVQWKVDNALQSGNSQESVTEQDSKDSTYSLSSTLTLSKADYEKHKVYACEVTHQGLSSPVTKSFNRGECSGGGGSEVQLVESGGGLVQPGGSLKLSCAASGFTFNKYAMNWVRQAPGKGLEWVARIRSKYNNYATYYADSVKDRFTISRDDSKNTAYLQMNNLKTEDTAVYYCVRHGNFGNSYISYWAYWGQGTLVTVSSGGGGSGGGGSGGGGSQTVVTQEPSLTVSPGGTVTLTCGSSTGAVTSGNYPNWVQQKPGQAPRGLIGGTKFLAPGTPARFSGSLLGGKAALTLSGVQPEDEAEYYCVLWYSNRWVFGGGTKLTVLGGGGDKTHTCPPCPAPELLGGPSVFLFPPKPKDTLMISRTPEVTCVVVDVSHEDPEVKFNWYVDGVEVHNAKTKPCEEQYGSTYRCVSVLTVLHQDWLNGKEYKCKVSNKALPAPIEKTISKAKGQPREPQVYTLPPSREEMTKNQVSLTCLVKGFYPSDIAVEWESNGQPENNYKTTPPVLDSDGSFFLYSKLTVDKSRWQQGNVFSCSVMHEALHNHYTQKSLSLSPGKGGGGSGGGGSGGGGSGGGGSGGGGSGGGGSDKTHTCPPCPAPELLGGPSVFLFPPKPKDTLMISRTPEVTCVVVDVSHEDPEVKFNWYVDGVEVHNAKTKPCEEQYGSTYRCVSVLTVLHQDWLNGKEYKCKVSNKALPAPIEKTISKAKGQPREPQVYTLPPSREEMTKNQVSLTCLVKGFYPSDIAVEWESNGQPENNYKTTPPVLDSDGSFFLYSKLTVDKSRWQQGNVFSCSVMHEALHNHYTQKSLSLSPGK

SEQ ID NO: 391 - protein, 5 aa, Artificial Sequence
  Synthetic Polypeptide
NAWMS

SEQ ID NO: 392 - protein, 19 aa, Artificial Sequence
  Synthetic Polypeptide
RITSSRYGGTTDYAAPVKG

SEQ ID NO: 393 - protein, 16 aa, Artificial Sequence
  Synthetic Polypeptide
PSYSGSYYNYFSVMDV

SEQ ID NO: 394 - protein, 11 aa, Artificial Sequence
  Synthetic Polypeptide
RTSQSISSYLN

SEQ ID NO: 395 - protein, 7 aa, Artificial Sequence
  Synthetic Polypeptide
AASSLQG

SEQ ID NO: 396 - protein, 9 aa, Artificial Sequence
  Synthetic Polypeptide
QQTYSMPFT

SEQ ID NO: 397 - protein, 127 aa, Artificial Sequence
  Synthetic Polypeptide
EVQLVESGGGLVQPGGSLRLSCAASGFTFSNAWMSWVRQAPGKCLEWVGRITSSRYGGTTDYAAPVKGRFTISRDDSKNTLFLQMNSLKTEDTAVYYCTTPSYSGSYYNYFSVMDVWGQGTTVTVSS

SEQ ID NO: 398 - protein, 107 aa, Artificial Sequence
  Synthetic Polypeptide
DIQMTQSPSSLSASVGDRVTITCRTSQSISSYLNWYQQKPGRAPKLLIFAASSLQGGVPSRFSGSGSGTDFTLTISSLQPEDFATYYCQQTYSMPFTFGCGTKVDIK

SEQ ID NO: 399 - protein, 249 aa, Artificial Sequence
  Synthetic Polypeptide
EVQLVESGGGLVQPGGSLRLSCAASGFTFSNAWMSWVRQAPGKCLEWVGRITSSRYGGTTDYAAPVKGRFTISRDDSKNTLFLQMNSLKTEDTAVYYCTTPSYSGSYYNYFSVMDVWGQGTTVTVSSGGGGSGGGGSGGGGSDIQMTQSPSSLSASVGDRVTITCRTSQSISSYLNWYQQKPGRAPKLLIFAASSLQGGVPSRFSGSGSGTDFTLTISSLQPEDFATYYCQQTYSMPFTFGCGTKVDIK

SEQ ID NO: 400 - protein, 504 aa, Artificial Sequence
  Synthetic Polypeptide
EVQLVESGGGLVQPGGSLRLSCAASGFTFSNAWMSWVRQAPGKCLEWVGRITSSRYGGTTDYAAPVKGRFTISRDDSKNTLFLQMNSLKTEDTAVYYCTTPSYSGSYYNYFSVMDVWGQGTTVTVSSGGGGSGGGGSGGGGSDIQMTQSPSSLSASVGDRVTITCRTSQSISSYLNWYQQKPGRAPKLLIFAASSLQGGVPSRFSGSGSGTDFTLTISSLQPEDFATYYCQQTYSMPFTFGCGTKVDIKSGGGGSEVQLVESGGGLVQPGGSLKLSCAASGFTFNKYAMNWVRQAPGKGLEWVARIRSKYNNYATYYADSVKDRFTISRDDSKNTAYLQMNNLKTEDTAVYYCVRHGNFGNSYISYWAYWGQGTLVTVSSGGGGSGGGGSGGGGSQTVVTQEPSLTVSPGGTVTLTCGSSTGAVTSGNYPNWVQQKPGQAPRGLIGGTKFLAPGTPARFSGSLLGGKAALTLSGVQPEDEAEYYCVLWYSNRWVFGGGTKLTVL

SEQ ID NO: 401 - protein, 992 aa, Artificial Sequence
  Synthetic Polypeptide
EVQLVESGGGLVQPGGSLRLSCAASGFTFSNAWMSWVRQAPGKCLEWVGRITSSRYGGTTDYAAPVKGRFTISRDDSKNTLFLQMNSLKTEDTAVYYCTTPSYSGSYYNYFSVMDVWGQGTTVTVSSGGGGSGGGGSGGGGSDIQMTQSPSSLSASVGDRVTITCRTSQSISSYLNWYQQKPGRAPKLLIFAASSLQGGVPSRFSGSGSGTDFTLTISSLQPEDFATYYCQQTYSMPFTFGCGTKVDIKSGGGGSEVQLVESGGGLVQPGGSLKLSCAASGFTFNKYAMNWVRQAPGKGLEWVARIRSKYNNYATYYADSVKDRFTISRDDSKNTAYLQMNNLKTEDTAVYYCVRHGNFGNSYISYWAYWGQGTLVTVSSGGGGSGGGGSGGGGSQTVVTQEPSLTVSPGGTVTLTCGSSTGAVTSGNYPNWVQQKPGQAPRGLIGGTKFLAPGTPARFSGSLLGGKAALTLSGVQPEDEAEYYCVLWYSNRWVFGGGTKLTVLGGGGDKTHTCPPCPAPELLGGPSVFLFPPKPKDTLMISRTPEVTCVVVDVSHEDPEVKFNWYVDGVEVHNAKTKPCEEQYGSTYRCVSVLTVLHQDWLNGKEYKCKVSNKALPAPIEKTISKAKGQPREPQVYTLPPSREEMTKNQVSLTCLVKGFYPSDIAVEWESNGQPENNYKTTPPVLDSDGSFFLYSKLTVDKSRWQQGNVFSCSVMHEALHNHYTQKSLSLSPGKGGGGSGGGGSGGGGSGGGGSGGGGSGGGGSDKTHTCPPCPAPELLGGPSVFLFPPKPKDTLMISRTPEVTCVVVDVSHEDPEVKFNWYVDGVEVHNAKTKPCEEQYGSTYRCVSVLTVLHQDWLNGKEYKCKVSNKALPAPIEKTISKAKGQPREPQVYTLPPSREEMTKNQVSLTCLVKGFYPSDIAVEWESNGQPENNYKTTPPVLDSDGSFFLYSKLTVDKSRWQQGNVFSCSVMHEALHNHYTQKSLSLSPGK

SEQ ID NO: 402 - protein, 230 aa, Artificial Sequence
  Synthetic Polypeptide
EVQLVESGGGLVQPGGSLRLSCAASGFTFSNAWMSWVRQAPGKGLEWVGRITSSRYGGTTDYAAPVKGRFTISRDDSKNTLFLQMNSLKTEDTAVYYCTTPSYSGSYYNYFSVMDVWGQGTTVTVSSASTKGPSVFPLAPSSKSTSGGTAALGCLVKDYFPEPVTVSWNSGALTSGVHTFPAVLQSSGLYSLSSVVTVPSSSLGTQTYICNVNHKPSNTKVDKKVEPKSC

SEQ ID NO: 403 - protein, 214 aa, Artificial Sequence
  Synthetic Polypeptide
DIQMTQSPSSLSASVGDRVTITCRTSQSISSYLNWYQQKPGRAPKLLIFAASSLQGGVPSRFSGSGSGTDFTLTISSLQPEDFATYYCQQTYSMPFTFGPGTKVDIKRTVAAPSVFIFPPSDEQLKSGTASVVCLLNNFYPREAKVQWKVDNALQSGNSQESVTEQDSKDSTYSLSSTLTLSKADYEKHKVYACEVTHQGLSSPVTKSFNRGEC

SEQ ID NO: 404 - protein, 484 aa, Artificial Sequence
  Synthetic Polypeptide
EVQLVESGGGLVQPGGSLRLSCAASGFTFSNAWMSWVRQAPGKGLEWVGRITSSRYGGTTDYAAPVKGRFTISRDDSKNTLFLQMNSLKTEDTAVYYCTTPSYSGSYYNYFSVMDVWGQGTTVTVSSASTKGPSVFPLAPSSKSTSGGTAALGCLVKDYFPEPVTVSWNSGALTSGVHTFPAVLQSSGLYSLSSVVTVPSSSLGTQTYICNVNHKPSNTKVDKKVEPKSCGGGGSGGGGSGGGGSGGGGSGGGGSGGGGSGGGGSGGGGSDIQMTQSPSSLSASVGDRVTITCRTSQSISSYLNWYQQKPGRAPKLLIFAASSLQGGVPSRFSGSGSGTDFTLTISSLQPEDFATYYCQQTYSMPFTFGPGTKVDIKRTVAAPSVFIFPPSDEQLKSGTASVVCLLNNFYPREAKVQWKVDNALQSGNSQESVTEQDSKDSTYSLSSTLTLSKADYEKHKVYACEVTHQGLSSPVTKSFNRGEC

SEQ ID NO: 405 - protein, 739 aa, Artificial Sequence
  Synthetic Polypeptide
EVQLVESGGGLVQPGGSLRLSCAASGFTFSNAWMSWVRQAPGKGLEWVGRITSSRYGGTTDYAAPVKGRFTISRDDSKNTLFLQMNSLKTEDTAVYYCTTPSYSGSYYNYFSVMDVWGQGTTVTVSSASTKGPSVFPLAPSSKSTSGGTAALGCLVKDYFPEPVTVSWNSGALTSGVHTFPAVLQSSGLYSLSSVVTVPSSSLGTQTYICNVNHKPSNTKVDKKVEPKSCGGGGSGGGGSGGGGSGGGGSGGGGSGGGGSGGGGSGGGGSDIQMTQSPSSLSASVGDRVTITCRTSQSISSYLNWYQQKPGRAPKLLIFAASSLQGGVPSRFSGSGSGTDFTLTISSLQPEDFATYYCQQTYSMPFTFGPGTKVDIKRTVAAPSVFIFPPSDEQLKSGTASVVCLLNNFYPREAKVQWKVDNALQSGNSQESVTEQDSKDSTYSLSSTLTLSKADYEKHKVYACEVTHQGLSSPVTKSFNRGECSGGGGSEVQLVESGGGLVQPGGSLKLSCAASGFTFNKYAMNWVRQAPGKGLEWVARIRSKYNNYATYYADSVKDRFTISRDDSKNTAYLQMNNLKTEDTAVYYCVRHGNFGNSYISYWAYWGQGTLVTVSSGGGGSGGGGSGGGGSQTVVTQEPSLTVSPGGTVTLTCGSSTGAVTSGNYPNWVQQKPGQAPRGLIGGTKFLAPGTPARFSGSLLGGKAALTLSGVQPEDEAEYYCVLWYSNRWVFGGGTKLTVL

SEQ ID NO: 406 - protein, 1227 aa, Artificial Sequence
  Synthetic Polypeptide
EVQLVESGGGLVQPGGSLRLSCAASGFTFSNAWMSWVRQAPGKGLEWVGRITSSRYGGTTDYAAPVKGRFTISRDDSKNTLFLQMNSLKTEDTAVYYCTTPSYSGSYYNYFSVMDVWGQGTTVTVSSASTKGPSVFPLAPSSKSTSGGTAALGCLVKDYFPEPVTVSWNSGALTSGVHTFPAVLQSSGLYSLSSVVTVPSSSLGTQTYICNVNHKPSNTKVDKKVEPKSCGGGGSGGGGSGGGGSGGGGSGGGGSGGGGSGGGGSGGGGSDIQMTQSPSSLSASVGDRVTITCRTSQSISSYLNWYQQKPGRAPKLLIFAASSLQGGVPSRFSGSGSGTDFTLTISSLQPEDFATYYCQQTYSMPFTFGPGTKVDIKRTVAAPSVFIFPPSDEQLKSGTASVVCLLNNFYPREAKVQWKVDNALQSGNSQESVTEQDSKDSTYSLSSTLTLSKADYEKHKVYACEVTHQGLSSPVTKSFNRGECSGGGGSEVQLVESGGGLVQPGGSLKLSCAASGFTFNKYAMNWVRQAPGKGLEWVARIRSKYNNYATYYADSVKDRFTISRDDSKNTAYLQMNNLKTEDTAVYYCVRHGNFGNSYISYWAYWGQGTLVTVSSGGGGSGGGGSGGGGSQTVVTQEPSLTVSPGGTVTLTCGSSTGAVTSGNYPNWVQQKPGQAPRGLIGGTKFLAPGTPARFSGSLLGGKAALTLSGVQPEDEAEYYCVLWYSNRWVFGGGTKLTVLGGGGDKTHTCPPCPAPELLGGPSVFLFPPKPKDTLMISRTPEVTCVVVDVSHEDPEVKFNWYVDGVEVHNAKTKPCEEQYGSTYRCVSVLTVLHQDWLNGKEYKCKVSNKALPAPIEKTISKAKGQPREPQVYTLPPSREEMTKNQVSLTCLVKGFYPSDIAVEWESNGQPENNYKTTPPVLDSDGSFFLYSKLTVDKSRWQQGNVFSCSVMHEALHNHYTQKSLSLSPGKGGGGSGGGGSGGGGSGGGGSGGGGSGGGGSDKTHTCPPCPAPELLGGPSVFLFPPKPKDTLMISRTPEVTCVVVDVSHEDPEVKFNWYVDGVEVHNAKTKPCEEQYGSTYRCVSVLTVLHQDWLNGKEYKCKVSNKALPAPIEKTISKAKGQPREPQVYTLPPSREEMTKNQVSLTCLVKGFYPSDIAVEWESNGQPENNYKTTPPVLDSDGSFFLYSKLTVDKSRWQQGNVFSCSVMHEALHNHYTQKSLSLSPGK

SEQ ID NO: 407 - protein, 5 aa, Artificial Sequence
  Synthetic Polypeptide
NAWMS

SEQ ID NO: 408 - protein, 19 aa, Artificial Sequence
  Synthetic Polypeptide
RILNNAYGGTTDYAAPVKG

SEQ ID NO: 409 - protein, 16 aa, Artificial Sequence
  Synthetic Polypeptide
PSYSGSYYNYFSVMDV

SEQ ID NO: 410 - protein, 11 aa, Artificial Sequence
  Synthetic Polypeptide
RTSQSISSYLN

SEQ ID NO: 411 - protein, 7 aa, Artificial Sequence
  Synthetic Polypeptide
AASSLQG

SEQ ID NO: 412 - protein, 9 aa, Artificial Sequence
  Synthetic Polypeptide
QQTYSMPFT

SEQ ID NO: 413 - protein, 127 aa, Artificial Sequence
  Synthetic Polypeptide
EVQLVESGGGLVKPGGSLRLSCAASGFTFSNAWMSWVRQAPGKCLEWVGRILNNAYGGTTDYAAPVKGRFTISRDDSKNTLYLQMNSLKTEDTAVYYCTTPSYSGSYYNYFSVMDVWGQGTTVTVSS

SEQ ID NO: 414 - protein, 107 aa, Artificial Sequence; identical to SEQ ID NO: 398
  Synthetic Polypeptide

SEQ ID NO: 415 - protein, 249 aa, Artificial Sequence
  Synthetic Polypeptide
EVQLVESGGGLVKPGGSLRLSCAASGFTFSNAWMSWVRQAPGKCLEWVGRILNNAYGGTTDYAAPVKGRFTISRDDSKNTLYLQMNSLKTEDTAVYYCTTPSYSGSYYNYFSVMDVWGQGTTVTVSSGGGGSGGGGSGGGGSDIQMTQSPSSLSASVGDRVTITCRTSQSISSYLNWYQQKPGRAPKLLIFAASSLQGGVPSRFSGSGSGTDFTLTISSLQPEDFATYYCQQTYSMPFTFGCGTKVDIK

SEQ ID NO: 416 - protein, 504 aa, Artificial Sequence
  Synthetic Polypeptide
EVQLVESGGGLVKPGGSLRLSCAASGFTFSNAWMSWVRQAPGKCLEWVGRILNNAYGGTTDYAAPVKGRFTISRDDSKNTLYLQMNSLKTEDTAVYYCTTPSYSGSYYNYFSVMDVWGQGTTVTVSSGGGGSGGGGSGGGGSDIQMTQSPSSLSASVGDRVTITCRTSQSISSYLNWYQQKPGRAPKLLIFAASSLQGGVPSRFSGSGSGTDFTLTISSLQPEDFATYYCQQTYSMPFTFGCGTKVDIKSGGGGSEVQLVESGGGLVQPGGSLKLSCAASGFTFNKYAMNWVRQAPGKGLEWVARIRSKYNNYATYYADSVKDRFTISRDDSKNTAYLQMNNLKTEDTAVYYCVRHGNFGNSYISYWAYWGQGTLVTVSSGGGGSGGGGSGGGGSQTVVTQEPSLTVSPGGTVTLTCGSSTGAVTSGNYPNWVQQKPGQAPRGLIGGTKFLAPGTPARFSGSLLGGKAALTLSGVQPEDEAEYYCVLWYSNRWVFGGGTKLTVL

SEQ ID NO: 417 - protein, 992 aa, Artificial Sequence
  Synthetic Polypeptide
EVQLVESGGGLVKPGGSLRLSCAASGFTFSNAWMSWVRQAPGKCLEWVGRILNNAYGGTTDYAAPVKGRFTISRDDSKNTLYLQMNSLKTEDTAVYYCTTPSYSGSYYNYFSVMDVWGQGTTVTVSSGGGGSGGGGSGGGGSDIQMTQSPSSLSASVGDRVTITCRTSQSISSYLNWYQQKPGRAPKLLIFAASSLQGGVPSRFSGSGSGTDFTLTISSLQPEDFATYYCQQTYSMPFTFGCGTKVDIKSGGGGSEVQLVESGGGLVQPGGSLKLSCAASGFTFNKYAMNWVRQAPGKGLEWVARIRSKYNNYATYYADSVKDRFTISRDDSKNTAYLQMNNLKTEDTAVYYCVRHGNFGNSYISYWAYWGQGTLVTVSSGGGGSGGGGSGGGGSQTVVTQEPSLTVSPGGTVTLTCGSSTGAVTSGNYPNWVQQKPGQAPRGLIGGTKFLAPGTPARFSGSLLGGKAALTLSGVQPEDEAEYYCVLWYSNRWVFGGGTKLTVLGGGGDKTHTCPPCPAPELLGGPSVFLFPPKPKDTLMISRTPEVTCVVVDVSHEDPEVKFNWYVDGVEVHNAKTKPCEEQYGSTYRCVSVLTVLHQDWLNGKEYKCKVSNKALPAPIEKTISKAKGQPREPQVYTLPPSREEMTKNQVSLTCLVKGFYPSDIAVEWESNGQPENNYKTTPPVLDSDGSFFLYSKLTVDKSRWQQGNVFSCSVMHEALHNHYTQKSLSLSPGKGGGGSGGGGSGGGGSGGGGSGGGGSGGGGSDKTHTCPPCPAPELLGGPSVFLFPPKPKDTLMISRTPEVTCVVVDVSHEDPEVKFNWYVDGVEVHNAKTKPCEEQYGSTYRCVSVLTVLHQDWLNGKEYKCKVSNKALPAPIEKTISKAKGQPREPQVYTLPPSREEMTKNQVSLTCLVKGFYPSDIAVEWESNGQPENNYKTTPPVLDSDGSFFLYSKLTVDKSRWQQGNVFSCSVMHEALHNHYTQKSLSLSPGK

SEQ ID NO: 418 - protein, 230 aa, Artificial Sequence
  Synthetic Polypeptide
EVQLVESGGGLVKPGGSLRLSCAASGFTFSNAWMSWVRQAPGKGLEWVGRILNNAYGGTTDYAAPVKGRFTISRDDSKNTLYLQMNSLKTEDTAVYYCTTPSYSGSYYNYFSVMDVWGQGTTVTVSSASTKGPSVFPLAPSSKSTSGGTAALGCLVKDYFPEPVTVSWNSGALTSGVHTFPAVLQSSGLYSLSSVVTVPSSSLGTQTYICNVNHKPSNTKVDKKVEPKSC

SEQ ID NO: 419 - protein, 214 aa, Artificial Sequence; identical to SEQ ID NO: 403
  Synthetic Polypeptide

SEQ ID NO: 420 - protein, 484 aa, Artificial Sequence
  Synthetic Polypeptide
EVQLVESGGGLVKPGGSLRLSCAASGFTFSNAWMSWVRQAPGKGLEWVGRILNNAYGGTTDYAAPVKGRFTISRDDSKNTLYLQMNSLKTEDTAVYYCTTPSYSGSYYNYFSVMDVWGQGTTVTVSSASTKGPSVFPLAPSSKSTSGGTAALGCLVKDYFPEPVTVSWNSGALTSGVHTFPAVLQSSGLYSLSSVVTVPSSSLGTQTYICNVNHKPSNTKVDKKVEPKSCGGGGSGGGGSGGGGSGGGGSGGGGSGGGGSGGGGSGGGGSDIQMTQSPSSLSASVGDRVTITCRTSQSISSYLNWYQQKPGRAPKLLIFAASSLQGGVPSRFSGSGSGTDFTLTISSLQPEDFATYYCQQTYSMPFTFGPGTKVDIKRTVAAPSVFIFPPSDEQLKSGTASVVCLLNNFYPREAKVQWKVDNALQSGNSQESVTEQDSKDSTYSLSSTLTLSKADYEKHKVYACEVTHQGLSSPVTKSFNRGEC

SEQ ID NO: 421 - protein, 739 aa, Artificial Sequence
  Synthetic Polypeptide
EVQLVESGGGLVKPGGSLRLSCAASGFTFSNAWMSWVRQAPGKGLEWVGRILNNAYGGTTDYAAPVKGRFTISRDDSKNTLYLQMNSLKTEDTAVYYCTTPSYSGSYYNYFSVMDVWGQGTTVTVSSASTKGPSVFPLAPSSKSTSGGTAALGCLVKDYFPEPVTVSWNSGALTSGVHTFPAVLQSSGLYSLSSVVTVPSSSLGTQTYICNVNHKPSNTKVDKKVEPKSCGGGGSGGGGSGGGGSGGGGSGGGGSGGGGSGGGGSGGGGSDIQMTQSPSSLSASVGDRVTITCRTSQSISSYLNWYQQKPGRAPKLLIFAASSLQGGVPSRFSGSGSGTDFTLTISSLQPEDFATYYCQQTYSMPFTFGPGTKVDIKRTVAAPSVFIFPPSDEQLKSGTASVVCLLNNFYPREAKVQWKVDNALQSGNSQESVTEQDSKDSTYSLSSTLTLSKADYEKHKVYACEVTHQGLSSPVTKSFNRGECSGGGGSEVQLVESGGGLVQPGGSLKLSCAASGFTFNKYAMNWVRQAPGKGLEWVARIRSKYNNYATYYADSVKDRFTISRDDSKNTAYLQMNNLKTEDTAVYYCVRHGNFGNSYISYWAYWGQGTLVTVSSGGGGSGGGGSGGGGSQTVVTQEPSLTVSPGGTVTLTCGSSTGAVTSGNYPNWVQQKPGQAPRGLIGGTKFLAPGTPARFSGSLLGGKAALTLSGVQPEDEAEYYCVLWYSNRWVFGGGTKLTVL

SEQ ID NO: 422 - protein, 1227 aa, Artificial Sequence
  Synthetic Polypeptide
EVQLVESGGGLVKPGGSLRLSCAASGFTFSNAWMSWVRQAPGKGLEWVGRILNNAYGGTTDYAAPVKGRFTISRDDSKNTLYLQMNSLKTEDTAVYYCTTPSYSGSYYNYFSVMDVWGQGTTVTVSSASTKGPSVFPLAPSSKSTSGGTAALGCLVKDYFPEPVTVSWNSGALTSGVHTFPAVLQSSGLYSLSSVVTVPSSSLGTQTYICNVNHKPSNTKVDKKVEPKSCGGGGSGGGGSGGGGSGGGGSGGGGSGGGGSGGGGSGGGGSDIQMTQSPSSLSASVGDRVTITCRTSQSISSYLNWYQQKPGRAPKLLIFAASSLQGGVPSRFSGSGSGTDFTLTISSLQPEDFATYYCQQTYSMPFTFGPGTKVDIKRTVAAPSVFIFPPSDEQLKSGTASVVCLLNNFYPREAKVQWKVDNALQSGNSQESVTEQDSKDSTYSLSSTLTLSKADYEKHKVYACEVTHQGLSSPVTKSFNRGECSGGGGSEVQLVESGGGLVQPGGSLKLSCAASGFTFNKYAMNWVRQAPGKGLEWVARIRSKYNNYATYYADSVKDRFTISRDDSKNTAYLQMNNLKTEDTAVYYCVRHGNFGNSYISYWAYWGQGTLVTVSSGGGGSGGGGSGGGGSQTVVTQEPSLTVSPGGTVTLTCGSSTGAVTSGNYPNWVQQKPGQAPRGLIGGTKFLAPGTPARFSGSLLGGKAALTLSGVQPEDEAEYYCVLWYSNRWVFGGGTKLTVLGGGGDKTHTCPPCPAPELLGGPSVFLFPPKPKDTLMISRTPEVTCVVVDVSHEDPEVKFNWYVDGVEVHNAKTKPCEEQYGSTYRCVSVLTVLHQDWLNGKEYKCKVSNKALPAPIEKTISKAKGQPREPQVYTLPPSREEMTKNQVSLTCLVKGFYPSDIAVEWESNGQPENNYKTTPPVLDSDGSFFLYSKLTVDKSRWQQGNVFSCSVMHEALHNHYTQKSLSLSPGKGGGGSGGGGSGGGGSGGGGSGGGGSGGGGSDKTHTCPPCPAPELLGGPSVFLFPPKPKDTLMISRTPEVTCVVVDVSHEDPEVKFNWYVDGVEVHNAKTKPCEEQYGSTYRCVSVLTVLHQDWLNGKEYKCKVSNKALPAPIEKTISKAKGQPREPQVYTLPPSREEMTKNQVSLTCLVKGFYPSDIAVEWESNGQPENNYKTTPPVLDSDGSFFLYSKLTVDKSRWQQGNVFSCSVMHEALHNHYTQKSLSLSPGK

SEQ ID NO: 423 - protein, 5 aa, Artificial Sequence
  Synthetic Polypeptide
SHAMS

SEQ ID NO: 424 - protein, 17 aa, Artificial Sequence
  Synthetic Polypeptide
AISGSGGGTYNAASVKG

SEQ ID NO: 425 - protein, 10 aa, Artificial Sequence
  Synthetic Polypeptide
GKGVHLGFDY

SEQ ID NO: 426 - protein, 11 aa, Artificial Sequence
  Synthetic Polypeptide
GGNNIGSKSVH

SEQ ID NO: 427 - protein, 7 aa, Artificial Sequence
  Synthetic Polypeptide
DDNDRPS

SEQ ID NO: 428 - protein, 11 aa, Artificial Sequence
  Synthetic Polypeptide
QVWDYVAPRHV

SEQ ID NO: 429 - protein, 119 aa, Artificial Sequence
  Synthetic Polypeptide
EVQLLESGGGLVQPGGSLRLSCAASGFTFSSHAMSWVRQAPGKCLEWVSAISGSGGGTYNAASVKGRFTISRDNSKNTLYLQMNSLRAEDTAVYYCATGKGVHLGFDYWGQGTLVTVSS

SEQ ID NO: 430 - protein, 108 aa, Artificial Sequence
  Synthetic Polypeptide
SYVLTQPPSVSVAPGQTARITCGGNNIGSKSVHWYQQKPGQAPVMVVYDDNDRPSGIPERFSGSNSGNTATLTISRVEAGDEADYYCQVWDYVAPRHVFGCGTKLTVL

SEQ ID NO: 431 - protein, 242 aa, Artificial Sequence
  Synthetic Polypeptide
EVQLLESGGGLVQPGGSLRLSCAASGFTFSSHAMSWVRQAPGKCLEWVSAISGSGGGTYNAASVKGRFTISRDNSKNTLYLQMNSLRAEDTAVYYCATGKGVHLGFDYWGQGTLVTVSSGGGGSGGGGSGGGGSSYVLTQPPSVSVAPGQTARITCGGNNIGSKSVHWYQQKPGQAPVMVVYDDNDRPSGIPERFSGSNSGNTATLTISRVEAGDEADYYCQVWDYVAPRHVFGCGTKLTVL

SEQ ID NO: 432 - protein, 497 aa, Artificial Sequence
  Synthetic Polypeptide
EVQLLESGGGLVQPGGSLRLSCAASGFTFSSHAMSWVRQAPGKCLEWVSAISGSGGGTYNAASVKGRFTISRDNSKNTLYLQMNSLRAEDTAVYYCATGKGVHLGFDYWGQGTLVTVSSGGGGSGGGGSGGGGSSYVLTQPPSVSVAPGQTARITCGGNNIGSKSVHWYQQKPGQAPVMVVYDDNDRPSGIPERFSGSNSGNTATLTISRVEAGDEADYYCQVWDYVAPRHVFGCGTKLTVLSGGGGSEVQLVESGGGLVQPGGSLKLSCAASGFTFNKYAMNWVRQAPGKGLEWVARIRSKYNNYATYYADSVKDRFTISRDDSKNTAYLQMNNLKTEDTAVYYCVRHGNFGNSYISYWAYWGQGTLVTVSSGGGGSGGGGSGGGGSQTVVTQEPSLTVSPGGTVTLTCGSSTGAVTSGNYPNWVQQKPGQAPRGLIGGTKFLAPGTPARFSGSLLGGKAALTLSGVQPEDEAEYYCVLWYSNRWVFGGGTKLTVL

SEQ ID NO: 433 - protein, 985 aa, Artificial Sequence
  Synthetic Polypeptide
EVQLLESGGGLVQPGGSLRLSCAASGFTFSSHAMSWVRQAPGKCLEWVSAISGSGGGTYNAASVKGRFTISRDNSKNTLYLQMNSLRAEDTAVYYCATGKGVHLGFDYWGQGTLVTVSSGGGGSGGGGSGGGGSSYVLTQPPSVSVAPGQTARITCGGNNIGSKSVHWYQQKPGQAPVMVVYDDNDRPSGIPERFSGSNSGNTATLTISRVEAGDEADYYCQVWDYVAPRHVFGCGTKLTVLSGGGGSEVQLVESGGGLVQPGGSLKLSCAASGFTFNKYAMNWVRQAPGKGLEWVARIRSKYNNYATYYADSVKDRFTISRDDSKNTAYLQMNNLKTEDTAVYYCVRHGNFGNSYISYWAYWGQGTLVTVSSGGGGSGGGGSGGGGSQTVVTQEPSLTVSPGGTVTLTCGSSTGAVTSGNYPNWVQQKPGQAPRGLIGGTKFLAPGTPARFSGSLLGGKAALTLSGVQPEDEAEYYCVLWYSNRWVFGGGTKLTVLGGGGDKTHTCPPCPAPELLGGPSVFLFPPKPKDTLMISRTPEVTCVVVDVSHEDPEVKFNWYVDGVEVHNAKTKPCEEQYGSTYRCVSVLTVLHQDWLNGKEYKCKVSNKALPAPIEKTISKAKGQPREPQVYTLPPSREEMTKNQVSLTCLVKGFYPSDIAVEWESNGQPENNYKTTPPVLDSDGSFFLYSKLTVDKSRWQQGNVFSCSVMHEALHNHYTQKSLSLSPGKGGGGSGGGGSGGGGSGGGGSGGGGSGGGGSDKTHTCPPCPAPELLGGPSVFLFPPKPKDTLMISRTPEVTCVVVDVSHEDPEVKFNWYVDGVEVHNAKTKPCEEQYGSTYRCVSVLTVLHQDWLNGKEYKCKVSNKALPAPIEKTISKAKGQPREPQVYTLPPSREEMTKNQVSLTCLVKGFYPSDIAVEWESNGQPENNYKTTPPVLDSDGSFFLYSKLTVDKSRWQQGNVFSCSVMHEALHNHYTQKSLSLSPGK

SEQ ID NO: 434 - protein, 222 aa, Artificial Sequence
  Synthetic Polypeptide
EVQLLESGGGLVQPGGSLRLSCAASGFTFSSHAMSWVRQAPGKGLEWVSAISGSGGGTYNAASVKGRFTISRDNSKNTLYLQMNSLRAEDTAVYYCATGKGVHLGFDYWGQGTLVTVSSASTKGPSVFPLAPSSKSTSGGTAALGCLVKDYFPEPVTVSWNSGALTSGVHTFPAVLQSSGLYSLSSVVTVPSSSLGTQTYICNVNHKPSNTKVDKKVEPKSC

SEQ ID NO: 435 - protein, 214 aa, Artificial Sequence
  Synthetic Polypeptide
SYVLTQPPSVSVAPGQTARITCGGNNIGSKSVHWYQQKPGQAPVMVVYDDNDRPSGIPERFSGSNSGNTATLTISRVEAGDEADYYCQVWDYVAPRHVFGGGTKLTVLGQPKAAPSVTLFPPSSEELQANKATLVCLISDFYPGAVTVAWKADSSPVKAGVETTTPSKQSNNKYAASSYLSLTPEQWKSHKSYSCQVTHEGSTVEKTVAPTECS

SEQ ID NO: 436 - protein, 476 aa, Artificial Sequence
  Synthetic Polypeptide
EVQLLESGGGLVQPGGSLRLSCAASGFTFSSHAMSWVRQAPGKGLEWVSAISGSGGGTYNAASVKGRFTISRDNSKNTLYLQMNSLRAEDTAVYYCATGKGVHLGFDYWGQGTLVTVSSASTKGPSVFPLAPSSKSTSGGTAALGCLVKDYFPEPVTVSWNSGALTSGVHTFPAVLQSSGLYSLSSVVTVPSSSLGTQTYICNVNHKPSNTKVDKKVEPKSCGGGGSGGGGSGGGGSGGGGSGGGGSGGGGSGGGGSGGGGSSYVLTQPPSVSVAPGQTARITCGGNNIGSKSVHWYQQKPGQAPVMVVYDDNDRPSGIPERFSGSNSGNTATLTISRVEAGDEADYYCQVWDYVAPRHVFGGGTKLTVLGQPKAAPSVTLFPPSSEELQANKATLVCLISDFYPGAVTVAWKADSSPVKAGVETTTPSKQSNNKYAASSYLSLTPEQWKSHKSYSCQVTHEGSTVEKTVAPTECS

SEQ ID NO: 437 - protein, 731 aa, Artificial Sequence
  Synthetic Polypeptide
EVQLLESGGGLVQPGGSLRLSCAASGFTFSSHAMSWVRQAPGKGLEWVSAISGSGGGTYNAASVKGRFTISRDNSKNTLYLQMNSLRAEDTAVYYCATGKGVHLGFDYWGQGTLVTVSSASTKGPSVFPLAPSSKSTSGGTAALGCLVKDYFPEPVTVSWNSGALTSGVHTFPAVLQSSGLYSLSSVVTVPSSSLGTQTYICNVNHKPSNTKVDKKVEPKSCGGGGSGGGGSGGGGSGGGGSGGGGSGGGGSGGGGSGGGGSSYVLTQPPSVSVAPGQTARITCGGNNIGSKSVHWYQQKPGQAPVMVVYDDNDRPSGIPERFSGSNSGNTATLTISRVEAGDEADYYCQVWDYVAPRHVFGGGTKLTVLGQPKAAPSVTLFPPSSEELQANKATLVCLISDFYPGAVTVAWKADSSPVKAGVETTTPSKQSNNKYAASSYLSLTPEQWKSHKSYSCQVTHEGSTVEKTVAPTECSSGGGGSEVQLVESGGGLVQPGGSLKLSCAASGFTFNKYAMNWVRQAPGKGLEWVARIRSKYNNYATYYADSVKDRFTISRDDSKNTAYLQMNNLKTEDTAVYYCVRHGNFGNSYISYWAYWGQGTLVTVSSGGGGSGGGGSGGGGSQTVVTQEPSLTVSPGGTVTLTCGSSTGAVTSGNYPNWVQQKPGQAPRGLIGGTKFLAPGTPARFSGSLLGGKAALTLSGVQPEDEAEYYCVLWYSNRWVFGGGTKLTVL

SEQ ID NO: 438 - protein, 1219 aa, Artificial Sequence
  Synthetic Polypeptide
EVQLLESGGGLVQPGGSLRLSCAASGFTFSSHAMSWVRQAPGKGLEWVSAISGSGGGTYNAASVKGRFTISRDNSKNTLYLQMNSLRAEDTAVYYCATGKGVHLGFDYWGQGTLVTVSSASTKGPSVFPLAPSSKSTSGGTAALGCLVKDYFPEPVTVSWNSGALTSGVHTFPAVLQSSGLYSLSSVVTVPSSSLGTQTYICNVNHKPSNTKVDKKVEPKSCGGGGSGGGGSGGGGSGGGGSGGGGSGGGGSGGGGSGGGGSSYVLTQPPSVSVAPGQTARITCGGNNIGSKSVHWYQQKPGQAPVMVVYDDNDRPSGIPERFSGSNSGNTATLTISRVEAGDEADYYCQVWDYVAPRHVFGGGTKLTVLGQPKAAPSVTLFPPSSEELQANKATLVCLISDFYPGAVTVAWKADSSPVKAGVETTTPSKQSNNKYAASSYLSLTPEQWKSHKSYSCQVTHEGSTVEKTVAPTECSSGGGGSEVQLVESGGGLVQPGGSLKLSCAASGFTFNKYAMNWVRQAPGKGLEWVARIRSKYNNYATYYADSVKDRFTISRDDSKNTAYLQMNNLKTEDTAVYYCVRHGNFGNSYISYWAYWGQGTLVTVSSGGGGSGGGGSGGGGSQTVVTQEPSLTVSPGGTVTLTCGSSTGAVTSGNYPNWVQQKPGQAPRGLIGGTKFLAPGTPARFSGSLLGGKAALTLSGVQPEDEAEYYCVLWYSNRWVFGGGTKLTVLGGGGDKTHTCPPCPAPELLGGPSVFLFPPKPKDTLMISRTPEVTCVVVDVSHEDPEVKFNWYVDGVEVHNAKTKPCEEQYGSTYRCVSVLTVLHQDWLNGKEYKCKVSNKALPAPIEKTISKAKGQPREPQVYTLPPSREEMTKNQVSLTCLVKGFYPSDIAVEWESNGQPENNYKTTPPVLDSDGSFFLYSKLTVDKSRWQQGNVFSCSVMHEALHNHYTQKSLSLSPGKGGGGSGGGGSGGGGSGGGGSGGGGSGGGGSDKTHTCPPCPAPELLGGPSVFLFPPKPKDTLMISRTPEVTCVVVDVSHEDPEVKFNWYVDGVEVHNAKTKPCEEQYGSTYRCVSVLTVLHQDWLNGKEYKCKVSNKALPAPIEKTISKAKGQPREPQVYTLPPSREEMTKNQVSLTCLVKGFYPSDIAVEWESNGQPENNYKTTPPVLDSDGSFFLYSKLTVDKSRWQQGNVFSCSVMHEALHNHYTQKSLSLSPGK

SEQ ID NO: 439 - protein, 5 aa, Artificial Sequence
  Synthetic Polypeptide
TYGMH

SEQ ID NO: 440 - protein, 17 aa, Artificial Sequence
  Synthetic Polypeptide
VISYDAETVKYAESVKG

SEQ ID NO: 441 - protein, 7 aa, Artificial Sequence
  Synthetic Polypeptide
GQLLTGY

SEQ ID NO: 442 - protein, 11 aa, Artificial Sequence
  Synthetic Polypeptide
RASQGISNYLA

SEQ ID NO: 443 - protein, 7 aa, Artificial Sequence
  Synthetic Polypeptide
AASTLQS

SEQ ID NO: 444 - protein, 9 aa, Artificial Sequence
  Synthetic Polypeptide
QKYNSAPFT

SEQ ID NO: 445 - protein, 116 aa, Artificial Sequence
  Synthetic Polypeptide
QVQLVESGGGVVQPGRSLRLSCAASGFTFSTYGMHWVRQAPGKCLEWVAVISYDAETVKYAESVKGRFTISRDNSKNTLYLQMNSLRAEDTAVYYCARGQLLTGYWGQGTLVTVSS

SEQ ID NO: 446 - protein, 107 aa, Artificial Sequence
  Synthetic Polypeptide
DIQMTQSPSSLSASVGDRVTITCRASQGISNYLAWYQQKPGKVPKLLIYAASTLQSGVPSRFSGSGSGTDFTLTISSLQPEDVATYYCQKYNSAPFTFGCGTKVEIK

SEQ ID NO: 447 - protein, 238 aa, Artificial Sequence
  Synthetic Polypeptide
QVQLVESGGGVVQPGRSLRLSCAASGFTFSTYGMHWVRQAPGKCLEWVAVISYDAETVKYAESVKGRFTISRDNSKNTLYLQMNSLRAEDTAVYYCARGQLLTGYWGQGTLVTVSSGGGGSGGGGSGGGGSDIQMTQSPSSLSASVGDRVTITCRASQGISNYLAWYQQKPGKVPKLLIYAASTLQSGVPSRFSGSGSGTDFTLTISSLQPEDVATYYCQKYNSAPFTFGCGTKVEIK

SEQ ID NO: 448 - protein, 493 aa, Artificial Sequence
  Synthetic Polypeptide
QVQLVESGGGVVQPGRSLRLSCAASGFTFSTYGMHWVRQAPGKCLEWVAVISYDAETVKYAESVKGRFTISRDNSKNTLYLQMNSLRAEDTAVYYCARGQLLTGYWGQGTLVTVSSGGGGSGGGGSGGGGSDIQMTQSPSSLSASVGDRVTITCRASQGISNYLAWYQQKPGKVPKLLIYAASTLQSGVPSRFSGSGSGTDFTLTISSLQPEDVATYYCQKYNSAPFTFGCGTKVEIKSGGGGSEVQLVESGGGLVQPGGSLKLSCAASGFTFNKYAMNWVRQAPGKGLEWVARIRSKYNNYATYYADSVKDRFTISRDDSKNTAYLQMNNLKTEDTAVYYCVRHGNFGNSYISYWAYWGQGTLVTVSSGGGGSGGGGSGGGGSQTVVTQEPSLTVSPGGTVTLTCGSSTGAVTSGNYPNWVQQKPGQAPRGLIGGTKFLAPGTPARFSGSLLGGKAALTLSGVQPEDEAEYYCVLWYSNRWVFGGGTKLTVL

SEQ ID NO: 449 - protein, 981 aa, Artificial Sequence
  Synthetic Polypeptide
QVQLVESGGGVVQPGRSLRLSCAASGFTFSTYGMHWVRQAPGKCLEWVAVISYDAETVKYAESVKGRFTISRDNSKNTLYLQMNSLRAEDTAVYYCARGQLLTGYWGQGTLVTVSSGGGGSGGGGSGGGGSDIQMTQSPSSLSASVGDRVTITCRASQGISNYLAWYQQKPGKVPKLLIYAASTLQSGVPSRFSGSGSGTDFTLTISSLQPEDVATYYCQKYNSAPFTFGCGTKVEIKSGGGGSEVQLVESGGGLVQPGGSLKLSCAASGFTFNKYAMNWVRQAPGKGLEWVARIRSKYNNYATYYADSVKDRFTISRDDSKNTAYLQMNNLKTEDTAVYYCVRHGNFGNSYISYWAYWGQGTLVTVSSGGGGSGGGGSGGGGSQTVVTQEPSLTVSPGGTVTLTCGSSTGAVTSGNYPNWVQQKPGQAPRGLIGGTKFLAPGTPARFSGSLLGGKAALTLSGVQPEDEAEYYCVLWYSNRWVFGGGTKLTVLGGGGDKTHTCPPCPAPELLGGPSVFLFPPKPKDTLMISRTPEVTCVVVDVSHEDPEVKFNWYVDGVEVHNAKTKPCEEQYGSTYRCVSVLTVLHQDWLNGKEYKCKVSNKALPAPIEKTISKAKGQPREPQVYTLPPSREEMTKNQVSLTCLVKGFYPSDIAVEWESNGQPENNYKTTPPVLDSDGSFFLYSKLTVDKSRWQQGNVFSCSVMHEALHNHYTQKSLSLSPGKGGGGSGGGGSGGGGSGGGGSGGGGSGGGGSDKTHTCPPCPAPELLGGPSVFLFPPKPKDTLMISRTPEVTCVVVDVSHEDPEVKFNWYVDGVEVHNAKTKPCEEQYGSTYRCVSVLTVLHQDWLNGKEYKCKVSNKALPAPIEKTISKAKGQPREPQVYTLPPSREEMTKNQVSLTCLVKGFYPSDIAVEWESNGQPENNYKTTPPVLDSDGSFFLYSKLTVDKSRWQQGNVFSCSVMHEALHNHYTQKSLSLSPGK

SEQ ID NO: 450 - protein, 219 aa, Artificial Sequence
  Synthetic Polypeptide
QVQLVESGGGVVQPGRSLRLSCAASGFTFSTYGMHWVRQAPGKGLEWVAVISYDAETVKYAESVKGRFTISRDNSKNTLYLQMNSLRAEDTAVYYCARGQLLTGYWGQGTLVTVSSASTKGPSVFPLAPSSKSTSGGTAALGCLVKDYFPEPVTVSWNSGALTSGVHTFPAVLQSSGLYSLSSVVTVPSSSLGTQTYICNVNHKPSNTKVDKKVEPKSC

SEQ ID NO: 451 - protein, 214 aa, Artificial Sequence
  Synthetic Polypeptide
DIQMTQSPSSLSASVGDRVTITCRASQGISNYLAWYQQKPGKVPKLLIYAASTLQSGVPSRFSGSGSGTDFTLTISSLQPEDVATYYCQKYNSAPFTFGPGTKVEIKRTVAAPSVFIFPPSDEQLKSGTASVVCLLNNFYPREAKVQWKVDNALQSGNSQESVTEQDSKDSTYSLSSTLTLSKADYEKHKVYACEVTHQGLSSPVTKSFNRGEC

SEQ ID NO: 452 - protein, 473 aa, Artificial Sequence
  Synthetic Polypeptide
QVQLVESGGGVVQPGRSLRLSCAASGFTFSTYGMHWVRQAPGKGLEWVAVISYDAETVKYAESVKGRFTISRDNSKNTLYLQMNSLRAEDTAVYYCARGQLLTGYWGQGTLVTVSSASTKGPSVFPLAPSSKSTSGGTAALGCLVKDYFPEPVTVSWNSGALTSGVHTFPAVLQSSGLYSLSSVVTVPSSSLGTQTYICNVNHKPSNTKVDKKVEPKSCGGGGSGGGGSGGGGSGGGGSGGGGSGGGGSGGGGSGGGGSDIQMTQSPSSLSASVGDRVTITCRASQGISNYLAWYQQKPGKVPKLLIYAASTLQSGVPSRFSGSGSGTDFTLTISSLQPEDVATYYCQKYNSAPFTFGPGTKVEIKRTVAAPSVFIFPPSDEQLKSGTASVVCLLNNFYPREAKVQWKVDNALQSGNSQESVTEQDSKDSTYSLSSTLTLSKADYEKHKVYACEVTHQGLSSPVTKSFNRGEC

SEQ ID NO: 453 - protein, 728 aa, Artificial Sequence
  Synthetic Polypeptide
QVQLVESGGGVVQPGRSLRLSCAASGFTFSTYGMHWVRQAPGKGLEWVAVISYDAETVKYAESVKGRFTISRDNSKNTLYLQMNSLRAEDTAVYYCARGQLLTGYWGQGTLVTVSSASTKGPSVFPLAPSSKSTSGGTAALGCLVKDYFPEPVTVSWNSGALTSGVHTFPAVLQSSGLYSLSSVVTVPSSSLGTQTYICNVNHKPSNTKVDKKVEPKSCGGGGSGGGGSGGGGSGGGGSGGGGSGGGGSGGGGSGGGGSDIQMTQSPSSLSASVGDRVTITCRASQGISNYLAWYQQKPGKVPKLLIYAASTLQSGVPSRFSGSGSGTDFTLTISSLQPEDVATYYCQKYNSAPFTFGPGTKVEIKRTVAAPSVFIFPPSDEQLKSGTASVVCLLNNFYPREAKVQWKVDNALQSGNSQESVTEQDSKDSTYSLSSTLTLSKADYEKHKVYACEVTHQGLSSPVTKSFNRGECSGGGGSEVQLVESGGGLVQPGGSLKLSCAASGFTFNKYAMNWVRQAPGKGLEWVARIRSKYNNYATYYADSVKDRFTISRDDSKNTAYLQMNNLKTEDTAVYYCVRHGNFGNSYISYWAYWGQGTLVTVSSGGGGSGGGGSGGGGSQTVVTQEPSLTVSPGGTVTLTCGSSTGAVTSGNYPNWVQQKPGQAPRGLIGGTKFLAPGTPARFSGSLLGGKAALTLSGVQPEDEAEYYCVLWYSNRWVFGGGTKLTVL

SEQ ID NO: 454 - protein, 1216 aa, Artificial Sequence
  Synthetic Polypeptide
QVQLVESGGGVVQPGRSLRLSCAASGFTFSTYGMHWVRQAPGKGLEWVAVISYDAETVKYAESVKGRFTISRDNSKNTLYLQMNSLRAEDTAVYYCARGQLLTGYWGQGTLVTVSSASTKGPSVFPLAPSSKSTSGGTAALGCLVKDYFPEPVTVSWNSGALTSGVHTFPAVLQSSGLYSLSSVVTVPSSSLGTQTYICNVNHKPSNTKVDKKVEPKSCGGGGSGGGGSGGGGSGGGGSGGGGSGGGGSGGGGSGGGGSDIQMTQSPSSLSASVGDRVTITCRASQGISNYLAWYQQKPGKVPKLLIYAASTLQSGVPSRFSGSGSGTDFTLTISSLQPEDVATYYCQKYNSAPFTFGPGTKVEIKRTVAAPSVFIFPPSDEQLKSGTASVVCLLNNFYPREAKVQWKVDNALQSGNSQESVTEQDSKDSTYSLSSTLTLSKADYEKHKVYACEVTHQGLSSPVTKSFNRGECSGGGGSEVQLVESGGGLVQPGGSLKLSCAASGFTFNKYAMNWVRQAPGKGLEWVARIRSKYNNYATYYADSVKDRFTISRDDSKNTAYLQMNNLKTEDTAVYYCVRHGNFGNSYISYWAYWGQGTLVTVSSGGGGSGGGGSGGGGSQTVVTQEPSLTVSPGGTVTLTCGSSTGAVTSGNYPNWVQQKPGQAPRGLIGGTKFLAPGTPARFSGSLLGGKAALTLSGVQPEDEAEYYCVLWYSNRWVFGGGTKLTVLGGGGDKTHTCPPCPAPELLGGPSVFLFPPKPKDTLMISRTPEVTCVVVDVSHEDPEVKFNWYVDGVEVHNAKTKPCEEQYGSTYRCVSVLTVLHQDWLNGKEYKCKVSNKALPAPIEKTISKAKGQPREPQVYTLPPSREEMTKNQVSLTCLVKGFYPSDIAVEWESNGQPENNYKTTPPVLDSDGSFFLYSKLTVDKSRWQQGNVFSCSVMHEALHNHYTQKSLSLSPGKGGGGSGGGGSGGGGSGGGGSGGGGSGGGGSDKTHTCPPCPAPELLGGPSVFLFPPKPKDTLMISRTPEVTCVVVDVSHEDPEVKFNWYVDGVEVHNAKTKPCEEQYGSTYRCVSVLTVLHQDWLNGKEYKCKVSNKALPAPIEKTISKAKGQPREPQVYTLPPSREEMTKNQVSLTCLVKGFYPSDIAVEWESNGQPENNYKTTPPVLDSDGSFFLYSKLTVDKSRWQQGNVFSCSVMHEALHNHYTQKSLSLSPGK

SEQ ID NO: 455 - protein, 5 aa, Artificial Sequence
  Synthetic Polypeptide
DYYMS

SEQ ID NO: 456 - protein, 17 aa, Artificial Sequence
  Synthetic Polypeptide
YISKSSYTVTYADAVKG

SEQ ID NO: 457 - protein, 8 aa, Artificial Sequence
  Synthetic Polypeptide
YNYGHFDY

SEQ ID NO: 458 - protein, 11 aa, Artificial Sequence
  Synthetic Polypeptide
GGNNIGSKSVH

SEQ ID NO: 459 - protein, 7 aa, Artificial Sequence
  Synthetic Polypeptide
DDADRPS

SEQ ID NO: 460 - protein, 12 aa, Artificial Sequence
  Synthetic Polypeptide
QVWDASAGYGVV

SEQ ID NO: 461 - protein, 117 aa, Artificial Sequence
  Synthetic Polypeptide
QVQLVESGGGLVKPGGSLRLSCAASGFTFSDYYMSWIRQAPGKCLEWVSYISKSSYTVTYADAVKGRFTISRDNAKNSLYLQMNSLRAEDTAVYYCATYNYGHFDYWGQGTLVTVSS

SEQ ID NO: 462 - protein, 109 aa, Artificial Sequence
  Synthetic Polypeptide
SYVLTQPPSVSVAPGQTARITCGGNNIGSKSVHWYQQKPGQAPVLVVYDDADRPSGIPERFSGSNSGNTATLTISRVEAGDEADYYCQVWDASAGYGVVFGCGTKLTVL

SEQ ID NO: 463 - protein, 241 aa, Artificial Sequence
  Synthetic Polypeptide
QVQLVESGGGLVKPGGSLRLSCAASGFTFSDYYMSWIRQAPGKCLEWVSYISKSSYTVTYADAVKGRFTISRDNAKNSLYLQMNSLRAEDTAVYYCATYNYGHFDYWGQGTLVTVSSGGGGSGGGGSGGGGSSYVLTQPPSVSVAPGQTARITCGGNNIGSKSVHWYQQKPGQAPVLVVYDDADRPSGIPERFSGSNSGNTATLTISRVEAGDEADYYCQVWDASAGYGVVFGCGTKLTVL

SEQ ID NO: 464 - protein, 496 aa, Artificial Sequence
  Synthetic Polypeptide
QVQLVESGGGLVKPGGSLRLSCAASGFTFSDYYMSWIRQAPGKCLEWVSYISKSSYTVTYADAVKGRFTISRDNAKNSLYLQMNSLRAEDTAVYYCATYNYGHFDYWGQGTLVTVSSGGGGSGGGGSGGGGSSYVLTQPPSVSVAPGQTARITCGGNNIGSKSVHWYQQKPGQAPVLVVYDDADRPSGIPERFSGSNSGNTATLTISRVEAGDEADYYCQVWDASAGYGVVFGCGTKLTVLSGGGGSEVQLVESGGGLVQPGGSLKLSCAASGFTFNKYAMNWVRQAPGKGLEWVARIRSKYNNYATYYADSVKDRFTISRDDSKNTAYLQMNNLKTEDTAVYYCVRHGNFGNSYISYWAYWGQGTLVTVSSGGGGSGGGGSGGGGSQTVVTQEPSLTVSPGGTVTLTCGSSTGAVTSGNYPNWVQQKPGQAPRGLIGGTKFLAPGTPARFSGSLLGGKAALTLSGVQPEDEAEYYCVLWYSNRWVFGGGTKLTVL

SEQ ID NO: 465 - protein, 984 aa, Artificial Sequence
  Synthetic Polypeptide
QVQLVESGGGLVKPGGSLRLSCAASGFTFSDYYMSWIRQAPGKCLEWVSYISKSSYTVTYADAVKGRFTISRDNAKNSLYLQMNSLRAEDTAVYYCATYNYGHFDYWGQGTLVTVSSGGGGSGGGGSGGGGSSYVLTQPPSVSVAPGQTARITCGGNNIGSKSVHWYQQKPGQAPVLVVYDDADRPSGIPERFSGSNSGNTATLTISRVEAGDEADYYCQVWDASAGYGVVFGCGTKLTVLSGGGGSEVQLVESGGGLVQPGGSLKLSCAASGFTFNKYAMNWVRQAPGKGLEWVARIRSKYNNYATYYADSVKDRFTISRDDSKNTAYLQMNNLKTEDTAVYYCVRHGNFGNSYISYWAYWGQGTLVTVSSGGGGSGGGGSGGGGSQTVVTQEPSLTVSPGGTVTLTCGSSTGAVTSGNYPNWVQQKPGQAPRGLIGGTKFLAPGTPARFSGSLLGGKAALTLSGVQPEDEAEYYCVLWYSNRWVFGGGTKLTVLGGGGDKTHTCPPCPAPELLGGPSVFLFPPKPKDTLMISRTPEVTCVVVDVSHEDPEVKFNWYVDGVEVHNAKTKPCEEQYGSTYRCVSVLTVLHQDWLNGKEYKCKVSNKALPAPIEKTISKAKGQPREPQVYTLPPSREEMTKNQVSLTCLVKGFYPSDIAVEWESNGQPENNYKTTPPVLDSDGSFFLYSKLTVDKSRWQQGNVFSCSVMHEALHNHYTQKSLSLSPGKGGGGSGGGGSGGGGSGGGGSGGGGSGGGGSDKTHTCPPCPAPELLGGPSVFLFPPKPKDTLMISRTPEVTCVVVDVSHEDPEVKFNWYVDGVEVHNAKTKPCEEQYGSTYRCVSVLTVLHQDWLNGKEYKCKVSNKALPAPIEKTISKAKGQPREPQVYTLPPSREEMTKNQVSLTCLVKGFYPSDIAVEWESNGQPENNYKTTPPVLDSDGSFFLYSKLTVDKSRWQQGNVFSCSVMHEALHNHYTQKSLSLSPGK

SEQ ID NO: 466 - protein, 220 aa, Artificial Sequence
  Synthetic Polypeptide
QVQLVESGGGLVKPGGSLRLSCAASGFTFSDYYMSWIRQAPGKGLEWVSYISKSSYTVTYADAVKGRFTISRDNAKNSLYLQMNSLRAEDTAVYYCATYNYGHFDYWGQGTLVTVSSASTKGPSVFPLAPSSKSTSGGTAALGCLVKDYFPEPVTVSWNSGALTSGVHTFPAVLQSSGLYSLSSVVTVPSSSLGTQTYICNVNHKPSNTKVDKKVEPKSC

SEQ ID NO: 467 - protein, 215 aa, Artificial Sequence
  Synthetic Polypeptide
SYVLTQPPSVSVAPGQTARITCGGNNIGSKSVHWYQQKPGQAPVLVVYDDADRPSGIPERFSGSNSGNTATLTISRVEAGDEADYYCQVWDASAGYGVVFGGGTKLTVLGQPKAAPSVTLFPPSSEELQANKATLVCLISDFYPGAVTVAWKADSSPVKAGVETTTPSKQSNNKYAASSYLSLTPEQWKSHKSYSCQVTHEGSTVEKTVAPTECS

SEQ ID NO: 468 - protein, 475 aa, Artificial Sequence
  Synthetic Polypeptide
QVQLVESGGGLVKPGGSLRLSCAASGFTFSDYYMSWIRQAPGKGLEWVSYISKSSYTVTYADAVKGRFTISRDNAKNSLYLQMNSLRAEDTAVYYCATYNYGHFDYWGQGTLVTVSSASTKGPSVFPLAPSSKSTSGGTAALGCLVKDYFPEPVTVSWNSGALTSGVHTFPAVLQSSGLYSLSSVVTVPSSSLGTQTYICNVNHKPSNTKVDKKVEPKSCGGGGSGGGGSGGGGSGGGGSGGGGSGGGGSGGGGSGGGGSSYVLTQPPSVSVAPGQTARITCGGNNIGSKSVHWYQQKPGQAPVLVVYDDADRPSGIPERFSGSNSGNTATLTISRVEAGDEADYYCQVWDASAGYGVVFGGGTKLTVLGQPKAAPSVTLFPPSSEELQANKATLVCLISDFYPGAVTVAWKADSSPVKAGVETTTPSKQSNNKYAASSYLSLTPEQWKSHKSYSCQVTHEGSTVEKTVAPTECS

SEQ ID NO: 469 - protein, 730 aa, Artificial Sequence
  Synthetic Polypeptide
QVQLVESGGGLVKPGGSLRLSCAASGFTFSDYYMSWIRQAPGKGLEWVSYISKSSYTVTYADAVKGRFTISRDNAKNSLYLQMNSLRAEDTAVYYCATYNYGHFDYWGQGTLVTVSSASTKGPSVFPLAPSSKSTSGGTAALGCLVKDYFPEPVTVSWNSGALTSGVHTFPAVLQSSGLYSLSSVVTVPSSSLGTQTYICNVNHKPSNTKVDKKVEPKSCGGGGSGGGGSGGGGSGGGGSGGGGSGGGGSGGGGSGGGGSSYVLTQPPSVSVAPGQTARITCGGNNIGSKSVHWYQQKPGQAPVLVVYDDADRPSGIPERFSGSNSGNTATLTISRVEAGDEADYYCQVWDASAGYGVVFGGGTKLTVLGQPKAAPSVTLFPPSSEELQANKATLVCLISDFYPGAVTVAWKADSSPVKAGVETTTPSKQSNNKYAASSYLSLTPEQWKSHKSYSCQVTHEGSTVEKTVAPTECSSGGGGSEVQLVESGGGLVQPGGSLKLSCAASGFTFNKYAMNWVRQAPGKGLEWVARIRSKYNNYATYYADSVKDRFTISRDDSKNTAYLQMNNLKTEDTAVYYCVRHGNFGNSYISYWAYWGQGTLVTVSSGGGGSGGGGSGGGGSQTVVTQEPSLTVSPGGTVTLTCGSSTGAVTSGNYPNWVQQKPGQAPRGLIGGTKFLAPGTPARFSGSLLGGKAALTLSGVQPEDEAEYYCVLWYSNRWVFGGGTKLTVL

SEQ ID NO: 470 - protein, 1218 aa, Artificial Sequence
  Synthetic Polypeptide
QVQLVESGGGLVKPGGSLRLSCAASGFTFSDYYMSWIRQAPGKGLEWVSYISKSSYTVTYADAVKGRFTISRDNAKNSLYLQMNSLRAEDTAVYYCATYNYGHFDYWGQGTLVTVSSASTKGPSVFPLAPSSKSTSGGTAALGCLVKDYFPEPVTVSWNSGALTSGVHTFPAVLQSSGLYSLSSVVTVPSSSLGTQTYICNVNHKPSNTKVDKKVEPKSCGGGGSGGGGSGGGGSGGGGSGGGGSGGGGSGGGGSGGGGSSYVLTQPPSVSVAPGQTARITCGGNNIGSKSVHWYQQKPGQAPVLVVYDDADRPSGIPERFSGSNSGNTATLTISRVEAGDEADYYCQVWDASAGYGVVFGGGTKLTVLGQPKAAPSVTLFPPSSEELQANKATLVCLISDFYPGAVTVAWKADSSPVKAGVETTTPSKQSNNKYAASSYLSLTPEQWKSHKSYSCQVTHEGSTVEKTVAPTECSSGGGGSEVQLVESGGGLVQPGGSLKLSCAASGFTFNKYAMNWVRQAPGKGLEWVARIRSKYNNYATYYADSVKDRFTISRDDSKNTAYLQMNNLKTEDTAVYYCVRHGNFGNSYISYWAYWGQGTLVTVSSGGGGSGGGGSGGGGSQTVVTQEPSLTVSPGGTVTLTCGSSTGAVTSGNYPNWVQQKPGQAPRGLIGGTKFLAPGTPARFSGSLLGGKAALTLSGVQPEDEAEYYCVLWYSNRWVFGGGTKLTVLGGGGDKTHTCPPCPAPELLGGPSVFLFPPKPKDTLMISRTPEVTCVVVDVSHEDPEVKFNWYVDGVEVHNAKTKPCEEQYGSTYRCVSVLTVLHQDWLNGKEYKCKVSNKALPAPIEKTISKAKGQPREPQVYTLPPSREEMTKNQVSLTCLVKGFYPSDIAVEWESNGQPENNYKTTPPVLDSDGSFFLYSKLTVDKSRWQQGNVFSCSVMHEALHNHYTQKSLSLSPGKGGGGSGGGGSGGGGSGGGGSGGGGSGGGGSDKTHTCPPCPAPELLGGPSVFLFPPKPKDTLMISRTPEVTCVVVDVSHEDPEVKFNWYVDGVEVHNAKTKPCEEQYGSTYRCVSVLTVLHQDWLNGKEYKCKVSNKALPAPIEKTISKAKGQPREPQVYTLPPSREEMTKNQVSLTCLVKGFYPSDIAVEWESNGQPENNYKTTPPVLDSDGSFFLYSKLTVDKSRWQQGNVFSCSVMHEALHNHYTQKSLSLSPGK

SEQ ID NO: 471 - protein, 7 aa, Artificial Sequence
  Synthetic Polypeptide
SNPYYWS

SEQ ID NO: 472 - protein, 16 aa, Artificial Sequence
  Synthetic Polypeptide
YISYSGITNYNPSLKS

SEQ ID NO: 473 - protein, 16 aa, Artificial Sequence
  Synthetic Polypeptide
EKMWFGVLNYYYGMDV

SEQ ID NO: 474 - protein, 16 aa, Artificial Sequence
  Synthetic Polypeptide
RSSQSLLHRSGYNYLD

SEQ ID NO: 475 - protein, 7 aa, Artificial Sequence
  Synthetic Polypeptide
LGSNRAS

SEQ ID NO: 476 - protein, 9 aa, Artificial Sequence
  Synthetic Polypeptide
MQALQTPWT

SEQ ID NO: 477 - protein, 126 aa, Artificial Sequence
  Synthetic Polypeptide
QVQLQESGPGLVKPSQTLSLTCTVSGDSISSNPYYWSWIRQHPGKCLEWIGYISYSGITNYNPSLKSRVTMSVDTSKNQFSLKLTSLTAADTAVYYCAREKMWFGVLNYYYGMDVWGQGTTVTVSS

SEQ ID NO: 478 - protein, 112 aa, Artificial Sequence
  Synthetic Polypeptide
DIVMTQTPLSLPVTPGEPASISCRSSQSLLHRSGYNYLDWYLQKPGQSPQLLIYLGSNRASGVPDRFSGSGSGTDFTLKISRVEAGDVGVYYCMQALQTPWTFGCGTKVEIK

SEQ ID NO: 479 - protein, 253 aa, Artificial Sequence
  Synthetic Polypeptide
QVQLQESGPGLVKPSQTLSLTCTVSGDSISSNPYYWSWIRQHPGKCLEWIGYISYSGITNYNPSLKSRVTMSVDTSKNQFSLKLTSLTAADTAVYYCAREKMWFGVLNYYYGMDVWGQGTTVTVSSGGGGSGGGGSGGGGSDIVMTQTPLSLPVTPGEPASISCRSSQSLLHRSGYNYLDWYLQKPGQSPQLLIYLGSNRASGVPDRFSGSGSGTDFTLKISRVEAGDVGVYYCMQALQTPWTFGCGTKVEIK

SEQ ID NO: 480 - protein, 508 aa, Artificial Sequence
  Synthetic Polypeptide
QVQLQESGPGLVKPSQTLSLTCTVSGDSISSNPYYWSWIRQHPGKCLEWIGYISYSGITNYNPSLKSRVTMSVDTSKNQFSLKLTSLTAADTAVYYCAREKMWFGVLNYYYGMDVWGQGTTVTVSSGGGGSGGGGSGGGGSDIVMTQTPLSLPVTPGEPASISCRSSQSLLHRSGYNYLDWYLQKPGQSPQLLIYLGSNRASGVPDRFSGSGSGTDFTLKISRVEAGDVGVYYCMQALQTPWTFGCGTKVEIKSGGGGSEVQLVESGGGLVQPGGSLKLSCAASGFTFNKYAMNWVRQAPGKGLEWVARIRSKYNNYATYYADSVKDRFTISRDDSKNTAYLQMNNLKTEDTAVYYCVRHGNFGNSYISYWAYWGQGTLVTVSSGGGGSGGGGSGGGGSQTVVTQEPSLTVSPGGTVTLTCGSSTGAVTSGNYPNWVQQKPGQAPRGLIGGTKFLAPGTPARFSGSLLGGKAALTLSGVQPEDEAEYYCVLWYSNRWVFGGGTKLTVL

SEQ ID NO: 481 - protein, 996 aa, Artificial Sequence
  Synthetic Polypeptide
QVQLQESGPGLVKPSQTLSLTCTVSGDSISSNPYYWSWIRQHPGKCLEWIGYISYSGITNYNPSLKSRVTMSVDTSKNQFSLKLTSLTAADTAVYYCAREKMWFGVLNYYYGMDVWGQGTTVTVSSGGGGSGGGGSGGGGSDIVMTQTPLSLPVTPGEPASISCRSSQSLLHRSGYNYLDWYLQKPGQSPQLLIYLGSNRASGVPDRFSGSGSGTDFTLKISRVEAGDVGVYYCMQALQTPWTFGCGTKVEIKSGGGGSEVQLVESGGGLVQPGGSLKLSCAASGFTFNKYAMNWVRQAPGKGLEWVARIRSKYNNYATYYADSVKDRFTISRDDSKNTAYLQMNNLKTEDTAVYYCVRHGNFGNSYISYWAYWGQGTLVTVSSGGGGSGGGGSGGGGSQTVVTQEPSLTVSPGGTVTLTCGSSTGAVTSGNYPNWVQQKPGQAPRGLIGGTKFLAPGTPARFSGSLLGGKAALTLSGVQPEDEAEYYCVLWYSNRWVFGGGTKLTVLGGGGDKTHTCPPCPAPELLGGPSVFLFPPKPKDTLMISRTPEVTCVVVDVSHEDPEVKFNWYVDGVEVHNAKTKPCEEQYGSTYRCVSVLTVLHQDWLNGKEYKCKVSNKALPAPIEKTISKAKGQPREPQVYTLPPSREEMTKNQVSLTCLVKGFYPSDIAVEWESNGQPENNYKTTPPVLDSDGSFFLYSKLTVDKSRWQQGNVFSCSVMHEALHNHYTQKSLSLSPGKGGGGSGGGGSGGGGSGGGGSGGGGSGGGGSDKTHTCPPCPAPELLGGPSVFLFPPKPKDTLMISRTPEVTCVVVDVSHEDPEVKFNWYVDGVEVHNAKTKPCEEQYGSTYRCVSVLTVLHQDWLNGKEYKCKVSNKALPAPIEKTISKAKGQPREPQVYTLPPSREEMTKNQVSLTCLVKGFYPSDIAVEWESNGQPENNYKTTPPVLDSDGSFFLYSKLTVDKSRWQQGNVFSCSVMHEALHNHYTQKSLSLSPGK

SEQ ID NO: 482 - protein, 229 aa, Artificial Sequence
  Synthetic Polypeptide
QVQLQESGPGLVKPSQTLSLTCTVSGDSISSNPYYWSWIRQHPGKGLEWIGYISYSGITNYNPSLKSRVTMSVDTSKNQFSLKLTSLTAADTAVYYCAREKMWFGVLNYYYGMDVWGQGTTVTVSSASTKGPSVFPLAPSSKSTSGGTAALGCLVKDYFPEPVTVSWNSGALTSGVHTFPAVLQSSGLYSLSSVVTVPSSSLGTQTYICNVNHKPSNTKVDKKVEPKSC

SEQ ID NO: 483 - protein, 219 aa, Artificial Sequence
  Synthetic Polypeptide
DIVMTQTPLSLPVTPGEPASISCRSSQSLLHRSGYNYLDWYLQKPGQSPQLLIYLGSNRASGVPDRFSGSGSGTDFTLKISRVEAGDVGVYYCMQALQTPWTFGQGTKVEIKRTVAAPSVFIFPPSDEQLKSGTASVVCLLNNFYPREAKVQWKVDNALQSGNSQESVTEQDSKDSTYSLSSTLTLSKADYEKHKVYACEVTHQGLSSPVTKSFNRGEC

SEQ ID NO: 484 - protein, 488 aa, Artificial Sequence
  Synthetic Polypeptide
QVQLQESGPGLVKPSQTLSLTCTVSGDSISSNPYYWSWIRQHPGKGLEWIGYISYSGITNYNPSLKSRVTMSVDTSKNQFSLKLTSLTAADTAVYYCAREKMWFGVLNYYYGMDVWGQGTTVTVSSASTKGPSVFPLAPSSKSTSGGTAALGCLVKDYFPEPVTVSWNSGALTSGVHTFPAVLQSSGLYSLSSVVTVPSSSLGTQTYICNVNHKPSNTKVDKKVEPKSCGGGGSGGGGSGGGGSGGGGSGGGGSGGGGSGGGGSGGGGSDIVMTQTPLSLPVTPGEPASISCRSSQSLLHRSGYNYLDWYLQKPGQSPQLLIYLGSNRASGVPDRFSGSGSGTDFTLKISRVEAGDVGVYYCMQALQTPWTFGQGTKVEIKRTVAAPSVFIFPPSDEQLKSGTASVVCLLNNFYPREAKVQWKVDNALQSGNSQESVTEQDSKDSTYSLSSTLTLSKADYEKHKVYACEVTHQGLSSPVTKSFNRGEC

SEQ ID NO: 485 - protein, 743 aa, Artificial Sequence
  Synthetic Polypeptide
QVQLQESGPGLVKPSQTLSLTCTVSGDSISSNPYYWSWIRQHPGKGLEWIGYISYSGITNYNPSLKSRVTMSVDTSKNQFSLKLTSLTAADTAVYYCAREKMWFGVLNYYYGMDVWGQGTTVTVSSASTKGPSVFPLAPSSKSTSGGTAALGCLVKDYFPEPVTVSWNSGALTSGVHTFPAVLQSSGLYSLSSVVTVPSSSLGTQTYICNVNHKPSNTKVDKKVEPKSCGGGGSGGGGSGGGGSGGGGSGGGGSGGGGSGGGGSGGGGSDIVMTQTPLSLPVTPGEPASISCRSSQSLLHRSGYNYLDWYLQKPGQSPQLLIYLGSNRASGVPDRFSGSGSGTDFTLKISRVEAGDVGVYYCMQALQTPWTFGQGTKVEIKRTVAAPSVFIFPPSDEQLKSGTASVVCLLNNFYPREAKVQWKVDNALQSGNSQESVTEQDSKDSTYSLSSTLTLSKADYEKHKVYACEVTHQGLSSPVTKSFNRGECSGGGGSEVQLVESGGGLVQPGGSLKLSCAASGFTFNKYAMNWVRQAPGKGLEWVARIRSKYNNYATYYADSVKDRFTISRDDSKNTAYLQMNNLKTEDTAVYYCVRHGNFGNSYISYWAYWGQGTLVTVSSGGGGSGGGGSGGGGSQTVVTQEPSLTVSPGGTVTLTCGSSTGAVTSGNYPNWVQQKPGQAPRGLIGGTKFLAPGTPARFSGSLLGGKAALTLSGVQPEDEAEYYCVLWYSNRWVFGGGTKLTVL

SEQ ID NO: 486 - protein, 1231 aa, Artificial Sequence
  Synthetic Polypeptide
QVQLQESGPGLVKPSQTLSLTCTVSGDSISSNPYYWSWIRQHPGKGLEWIGYISYSGITNYNPSLKSRVTMSVDTSKNQFSLKLTSLTAADTAVYYCAREKMWFGVLNYYYGMDVWGQGTTVTVSSASTKGPSVFPLAPSSKSTSGGTAALGCLVKDYFPEPVTVSWNSGALTSGVHTFPAVLQSSGLYSLSSVVTVPSSSLGTQTYICNVNHKPSNTKVDKKVEPKSCGGGGSGGGGSGGGGSGGGGSGGGGSGGGGSGGGGSGGGGSDIVMTQTPLSLPVTPGEPASISCRSSQSLLHRSGYNYLDWYLQKPGQSPQLLIYLGSNRASGVPDRFSGSGSGTDFTLKISRVEAGDVGVYYCMQALQTPWTFGQGTKVEIKRTVAAPSVFIFPPSDEQLKSGTASVVCLLNNFYPREAKVQWKVDNALQSGNSQESVTEQDSKDSTYSLSSTLTLSKADYEKHKVYACEVTHQGLSSPVTKSFNRGECSGGGGSEVQLVESGGGLVQPGGSLKLSCAASGFTFNKYAMNWVRQAPGKGLEWVARIRSKYNNYATYYADSVKDRFTISRDDSKNTAYLQMNNLKTEDTAVYYCVRHGNFGNSYISYWAYWGQGTLVTVSSGGGGSGGGGSGGGGSQTVVTQEPSLTVSPGGTVTLTCGSSTGAVTSGNYPNWVQQKPGQAPRGLIGGTKFLAPGTPARFSGSLLGGKAALTLSGVQPEDEAEYYCVLWYSNRWVFGGGTKLTVLGGGGDKTHTCPPCPAPELLGGPSVFLFPPKPKDTLMISRTPEVTCVVVDVSHEDPEVKFNWYVDGVEVHNAKTKPCEEQYGSTYRCVSVLTVLHQDWLNGKEYKCKVSNKALPAPIEKTISKAKGQPREPQVYTLPPSREEMTKNQVSLTCLVKGFYPSDIAVEWESNGQPENNYKTTPPVLDSDGSFFLYSKLTVDKSRWQQGNVFSCSVMHEALHNHYTQKSLSLSPGKGGGGSGGGGSGGGGSGGGGSGGGGSGGGGSDKTHTCPPCPAPELLGGPSVFLFPPKPKDTLMISRTPEVTCVVVDVSHEDPEVKFNWYVDGVEVHNAKTKPCEEQYGSTYRCVSVLTVLHQDWLNGKEYKCKVSNKALPAPIEKTISKAKGQPREPQVYTLPPSREEMTKNQVSLTCLVKGFYPSDIAVEWESNGQPENNYKTTPPVLDSDGSFFLYSKLTVDKSRWQQGNVFSCSVMHEALHNHYTQKSLSLSPGK

SEQ ID NO: 487 - protein, 5 aa, Artificial Sequence
  Synthetic Polypeptide
SYAMS

SEQ ID NO: 488 - protein, 17 aa, Artificial Sequence
  Synthetic Polypeptide
AISGSGGGTYYAASVKG

SEQ ID NO: 489 - protein, 10 aa, Artificial Sequence
  Synthetic Polypeptide
GKGVHLGFDY

SEQ ID NO: 490 - protein, 11 aa, Artificial Sequence
  Synthetic Polypeptide
GGNNIGSKSVH

SEQ ID NO: 491 - protein, 7 aa, Artificial Sequence
  Synthetic Polypeptide
DDNDRPS

SEQ ID NO: 492 - protein, 11 aa, Artificial Sequence
  Synthetic Polypeptide
QVWDYSGQRQV

SEQ ID NO: 493 - protein, 119 aa, Artificial Sequence
  Synthetic Polypeptide
EVQLLESGGGLVQPGGSLRLSCAASGFTFSSYAMSWVRQAPGKCLEWVSAISGSGGGTYYAASVKGRFTISRDNSKNTLYLQMSSLRAEDTAVYYCATGKGVHLGFDYWGQGTLVTVSS

SEQ ID NO: 494 - protein, 108 aa, Artificial Sequence
  Synthetic Polypeptide
SYVLTQPPSVSVAPGQTARITCGGNNIGSKSVHWYQQKPGQAPVMVVYDDNDRPSGIPERFSGSNSGNTATLTISRVEAGDEADYYCQVWDYSGQRQVFGCGTKLTVL

SEQ ID NO: 495 - protein, 242 aa, Artificial Sequence
  Synthetic Polypeptide
EVQLLESGGGLVQPGGSLRLSCAASGFTFSSYAMSWVRQAPGKCLEWVSAISGSGGGTYYAASVKGRFTISRDNSKNTLYLQMSSLRAEDTAVYYCATGKGVHLGFDYWGQGTLVTVSSGGGGSGGGGSGGGGSSYVLTQPPSVSVAPGQTARITCGGNNIGSKSVHWYQQKPGQAPVMVVYDDNDRPSGIPERFSGSNSGNTATLTISRVEAGDEADYYCQVWDYSGQRQVFGCGTKLTVL

SEQ ID NO: 496 - protein, 497 aa, Artificial Sequence
  Synthetic Polypeptide
EVQLLESGGGLVQPGGSLRLSCAASGFTFSSYAMSWVRQAPGKCLEWVSAISGSGGGTYYAASVKGRFTISRDNSKNTLYLQMSSLRAEDTAVYYCATGKGVHLGFDYWGQGTLVTVSSGGGGSGGGGSGGGGSSYVLTQPPSVSVAPGQTARITCGGNNIGSKSVHWYQQKPGQAPVMVVYDDNDRPSGIPERFSGSNSGNTATLTISRVEAGDEADYYCQVWDYSGQRQVFGCGTKLTVLSGGGGSEVQLVESGGGLVQPGGSLKLSCAASGFTFNKYAMNWVRQAPGKGLEWVARIRSKYNNYATYYADSVKDRFTISRDDSKNTAYLQMNNLKTEDTAVYYCVRHGNFGNSYISYWAYWGQGTLVTVSSGGGGSGGGGSGGGGSQTVVTQEPSLTVSPGGTVTLTCGSSTGAVTSGNYPNWVQQKPGQAPRGLIGGTKFLAPGTPARFSGSLLGGKAALTLSGVQPEDEAEYYCVLWYSNRWVFGGGTKLTVL

SEQ ID NO: 497 - protein, 985 aa, Artificial Sequence
  Synthetic Polypeptide
EVQLLESGGGLVQPGGSLRLSCAASGFTFSSYAMSWVRQAPGKCLEWVSAISGSGGGTYYAASVKGRFTISRDNSKNTLYLQMSSLRAEDTAVYYCATGKGVHLGFDYWGQGTLVTVSSGGGGSGGGGSGGGGSSYVLTQPPSVSVAPGQTARITCGGNNIGSKSVHWYQQKPGQAPVMVVYDDNDRPSGIPERFSGSNSGNTATLTISRVEAGDEADYYCQVWDYSGQRQVFGCGTKLTVLSGGGGSEVQLVESGGGLVQPGGSLKLSCAASGFTFNKYAMNWVRQAPGKGLEWVARIRSKYNNYATYYADSVKDRFTISRDDSKNTAYLQMNNLKTEDTAVYYCVRHGNFGNSYISYWAYWGQGTLVTVSSGGGGSGGGGSGGGGSQTVVTQEPSLTVSPGGTVTLTCGSSTGAVTSGNYPNWVQQKPGQAPRGLIGGTKFLAPGTPARFSGSLLGGKAALTLSGVQPEDEAEYYCVLWYSNRWVFGGGTKLTVLGGGGDKTHTCPPCPAPELLGGPSVFLFPPKPKDTLMISRTPEVTCVVVDVSHEDPEVKFNWYVDGVEVHNAKTKPCEEQYGSTYRCVSVLTVLHQDWLNGKEYKCKVSNKALPAPIEKTISKAKGQPREPQVYTLPPSREEMTKNQVSLTCLVKGFYPSDIAVEWESNGQPENNYKTTPPVLDSDGSFFLYSKLTVDKSRWQQGNVFSCSVMHEALHNHYTQKSLSLSPGKGGGGSGGGGSGGGGSGGGGSGGGGSGGGGSDKTHTCPPCPAPELLGGPSVFLFPPKPKDTLMISRTPEVTCVVVDVSHEDPEVKFNWYVDGVEVHNAKTKPCEEQYGSTYRCVSVLTVLHQDWLNGKEYKCKVSNKALPAPIEKTISKAKGQPREPQVYTLPPSREEMTKNQVSLTCLVKGFYPSDIAVEWESNGQPENNYKTTPPVLDSDGSFFLYSKLTVDKSRWQQGNVFSCSVMHEALHNHYTQKSLSLSPGK

SEQ ID NO: 498 - protein, 222 aa, Artificial Sequence
  Synthetic Polypeptide
EVQLLESGGGLVQPGGSLRLSCAASGFTFSSYAMSWVRQAPGKGLEWVSAISGSGGGTYYAASVKGRFTISRDNSKNTLYLQMSSLRAEDTAVYYCATGKGVHLGFDYWGQGTLVTVSSASTKGPSVFPLAPSSKSTSGGTAALGCLVKDYFPEPVTVSWNSGALTSGVHTFPAVLQSSGLYSLSSVVTVPSSSLGTQTYICNVNHKPSNTKVDKKVEPKSC

SEQ ID NO: 499 - protein, 108 aa, Artificial Sequence
  Synthetic Polypeptide
SYVLTQPPSVSVAPGQTARITCGGNNIGSKSVHWYQQKPGQAPVMVVYDDNDRPSGIPERFSGSNSGNTATLTISRVEAGDEADYYCQVWDYSGQRQVFGGGTKLTVL

SEQ ID NO: 500 - protein, 370 aa, Artificial Sequence
  Synthetic Polypeptide
EVQLLESGGGLVQPGGSLRLSCAASGFTFSSYAMSWVRQAPGKGLEWVSAISGSGGGTYYAASVKGRFTISRDNSKNTLYLQMSSLRAEDTAVYYCATGKGVHLGFDYWGQGTLVTVSSASTKGPSVFPLAPSSKSTSGGTAALGCLVKDYFPEPVTVSWNSGALTSGVHTFPAVLQSSGLYSLSSVVTVPSSSLGTQTYICNVNHKPSNTKVDKKVEPKSCGGGGSGGGGSGGGGSGGGGSGGGGSGGGGSGGGGSGGGGSSYVLTQPPSVSVAPGQTARITCGGNNIGSKSVHWYQQKPGQAPVMVVYDDNDRPSGIPERFSGSNSGNTATLTISRVEAGDEADYYCQVWDYSGQRQVFGGGTKLTVL

SEQ ID NO: 501 - protein, 625 aa, Artificial Sequence
  Synthetic Polypeptide
EVQLLESGGGLVQPGGSLRLSCAASGFTFSSYAMSWVRQAPGKGLEWVSAISGSGGGTYYAASVKGRFTISRDNSKNTLYLQMSSLRAEDTAVYYCATGKGVHLGFDYWGQGTLVTVSSASTKGPSVFPLAPSSKSTSGGTAALGCLVKDYFPEPVTVSWNSGALTSGVHTFPAVLQSSGLYSLSSVVTVPSSSLGTQTYICNVNHKPSNTKVDKKVEPKSCGGGGSGGGGSGGGGSGGGGSGGGGSGGGGSGGGGSGGGGSSYVLTQPPSVSVAPGQTARITCGGNNIGSKSVHWYQQKPGQAPVMVVYDDNDRPSGIPERFSGSNSGNTATLTISRVEAGDEADYYCQVWDYSGQRQVFGGGTKLTVLSGGGGSEVQLVESGGGLVQPGGSLKLSCAASGFTFNKYAMNWVRQAPGKGLEWVARIRSKYNNYATYYADSVKDRFTISRDDSKNTAYLQMNNLKTEDTAVYYCVRHGNFGNSYISYWAYWGQGTLVTVSSGGGGSGGGGSGGGGSQTVVTQEPSLTVSPGGTVTLTCGSSTGAVTSGNYPNWVQQKPGQAPRGLIGGTKFLAPGTPARFSGSLLGGKAALTLSGVQPEDEAEYYCVLWYSNRWVFGGGTKLTVL

SEQ ID NO: 502 - protein, 1113 aa, Artificial Sequence
  Synthetic Polypeptide
EVQLLESGGGLVQPGGSLRLSCAASGFTFSSYAMSWVRQAPGKGLEWVSAISGSGGGTYYAASVKGRFTISRDNSKNTLYLQMSSLRAEDTAVYYCATGKGVHLGFDYWGQGTLVTVSSASTKGPSVFPLAPSSKSTSGGTAALGCLVKDYFPEPVTVSWNSGALTSGVHTFPAVLQSSGLYSLSSVVTVPSSSLGTQTYICNVNHKPSNTKVDKKVEPKSCGGGGSGGGGSGGGGSGGGGSGGGGSGGGGSGGGGSGGGGSSYVLTQPPSVSVAPGQTARITCGGNNIGSKSVHWYQQKPGQAPVMVVYDDNDRPSGIPERFSGSNSGNTATLTISRVEAGDEADYYCQVWDYSGQRQVFGGGTKLTVLSGGGGSEVQLVESGGGLVQPGGSLKLSCAASGFTFNKYAMNWVRQAPGKGLEWVARIRSKYNNYATYYADSVKDRFTISRDDSKNTAYLQMNNLKTEDTAVYYCVRHGNFGNSYISYWAYWGQGTLVTVSSGGGGSGGGGSGGGGSQTVVTQEPSLTVSPGGTVTLTCGSSTGAVTSGNYPNWVQQKPGQAPRGLIGGTKFLAPGTPARFSGSLLGGKAALTLSGVQPEDEAEYYCVLWYSNRWVFGGGTKLTVLGGGGDKTHTCPPCPAPELLGGPSVFLFPPKPKDTLMISRTPEVTCVVVDVSHEDPEVKFNWYVDGVEVHNAKTKPCEEQYGSTYRCVSVLTVLHQDWLNGKEYKCKVSNKALPAPIEKTISKAKGQPREPQVYTLPPSREEMTKNQVSLTCLVKGFYPSDIAVEWESNGQPENNYKTTPPVLDSDGSFFLYSKLTVDKSRWQQGNVFSCSVMHEALHNHYTQKSLSLSPGKGGGGSGGGGSGGGGSGGGGSGGGGSGGGGSDKTHTCPPCPAPELLGGPSVFLFPPKPKDTLMISRTPEVTCVVVDVSHEDPEVKFNWYVDGVEVHNAKTKPCEEQYGSTYRCVSVLTVLHQDWLNGKEYKCKVSNKALPAPIEKTISKAKGQPREPQVYTLPPSREEMTKNQVSLTCLVKGFYPSDIAVEWESNGQPENNYKTTPPVLDSDGSFFLYSKLTVDKSRWQQGNVFSCSVMHEALHNHYTQKSLSLSPGK

SEQ ID NO: 503 - protein, 5 aa, Artificial Sequence
  Synthetic Polypeptide
NAWMS

SEQ ID NO: 504 - protein, 19 aa, Artificial Sequence
  Synthetic Polypeptide
RIRSRSYGGTTDYAAPVKG

SEQ ID NO: 505 - protein, 16 aa, Artificial Sequence
  Synthetic Polypeptide
PSYSGSYYNYFSVMDV

SEQ ID NO: 506 - protein, 11 aa, Artificial Sequence
  Synthetic Polypeptide
RTSQSISSYLN

SEQ ID NO: 507 - protein, 7 aa, Artificial Sequence
  Synthetic Polypeptide
AASSLQG

SEQ ID NO: 508 - protein, 9 aa, Artificial Sequence
  Synthetic Polypeptide
QQTYSMPFT

SEQ ID NO: 509 - protein, 127 aa, Artificial Sequence
  Synthetic Polypeptide
EVQLVESGGGLVQPGGSLRLSCAASGFTFSNAWMSWVRQAPGKCLEWVGRIRSRSYGGTTDYAAPVKGRFTISRDDSKNTLFLQMNSLKTEDTAVYYCTTPSYSGSYYNYFSVMDVWGQGTTVTVSS

SEQ ID NO: 510 - protein, 107 aa, Artificial Sequence
  Synthetic Polypeptide
DIQMTQSPSSLSASVGDRVTITCRTSQSISSYLNWYQQKPGRAPKLLIFAASSLQGGVPSRFSGSGSGTDFTLTISSLQPEDFATYYCQQTYSMPFTFGCGTKVEIK

SEQ ID NO: 511 - protein, 249 aa, Artificial Sequence
  Synthetic Polypeptide
EVQLVESGGGLVQPGGSLRLSCAASGFTFSNAWMSWVRQAPGKCLEWVGRIRSRSYGGTTDYAAPVKGRFTISRDDSKNTLFLQMNSLKTEDTAVYYCTTPSYSGSYYNYFSVMDVWGQGTTVTVSSGGGGSGGGGSGGGGSDIQMTQSPSSLSASVGDRVTITCRTSQSISSYLNWYQQKPGRAPKLLIFAASSLQGGVPSRFSGSGSGTDFTLTISSLQPEDFATYYCQQTYSMPFTFGCGTKVEIK

SEQ ID NO: 512 - protein, 504 aa, Artificial Sequence
  Synthetic Polypeptide
EVQLVESGGGLVQPGGSLRLSCAASGFTFSNAWMSWVRQAPGKCLEWVGRIRSRSYGGTTDYAAPVKGRFTISRDDSKNTLFLQMNSLKTEDTAVYYCTTPSYSGSYYNYFSVMDVWGQGTTVTVSSGGGGSGGGGSGGGGSDIQMTQSPSSLSASVGDRVTITCRTSQSISSYLNWYQQKPGRAPKLLIFAASSLQGGVPSRFSGSGSGTDFTLTISSLQPEDFATYYCQQTYSMPFTFGCGTKVEIKSGGGGSEVQLVESGGGLVQPGGSLKLSCAASGFTFNKYAMNWVRQAPGKGLEWVARIRSKYNNYATYYADSVKDRFTISRDDSKNTAYLQMNNLKTEDTAVYYCVRHGNFGNSYISYWAYWGQGTLVTVSSGGGGSGGGGSGGGGSQTVVTQEPSLTVSPGGTVTLTCGSSTGAVTSGNYPNWVQQKPGQAPRGLIGGTKFLAPGTPARFSGSLLGGKAALTLSGVQPEDEAEYYCVLWYSNRWVFGGGTKLTVL

SEQ ID NO: 513 - protein, 992 aa, Artificial Sequence
  Synthetic Polypeptide
EVQLVESGGGLVQPGGSLRLSCAASGFTFSNAWMSWVRQAPGKCLEWVGRIRSRSYGGTTDYAAPVKGRFTISRDDSKNTLFLQMNSLKTEDTAVYYCTTPSYSGSYYNYFSVMDVWGQGTTVTVSSGGGGSGGGGSGGGGSDIQMTQSPSSLSASVGDRVTITCRTSQSISSYLNWYQQKPGRAPKLLIFAASSLQGGVPSRFSGSGSGTDFTLTISSLQPEDFATYYCQQTYSMPFTFGCGTKVEIKSGGGGSEVQLVESGGGLVQPGGSLKLSCAASGFTFNKYAMNWVRQAPGKGLEWVARIRSKYNNYATYYADSVKDRFTISRDDSKNTAYLQMNNLKTEDTAVYYCVRHGNFGNSYISYWAYWGQGTLVTVSSGGGGSGGGGSGGGGSQTVVTQEPSLTVSPGGTVTLTCGSSTGAVTSGNYPNWVQQKPGQAPRGLIGGTKFLAPGTPARFSGSLLGGKAALTLSGVQPEDEAEYYCVLWYSNRWVFGGGTKLTVLGGGGDKTHTCPPCPAPELLGGPSVFLFPPKPKDTLMISRTPEVTCVVVDVSHEDPEVKFNWYVDGVEVHNAKTKPCEEQYGSTYRCVSVLTVLHQDWLNGKEYKCKVSNKALPAPIEKTISKAKGQPREPQVYTLPPSREEMTKNQVSLTCLVKGFYPSDIAVEWESNGQPENNYKTTPPVLDSDGSFFLYSKLTVDKSRWQQGNVFSCSVMHEALHNHYTQKSLSLSPGKGGGGSGGGGSGGGGSGGGGSGGGGSGGGGSDKTHTCPPCPAPELLGGPSVFLFPPKPKDTLMISRTPEVTCVVVDVSHEDPEVKFNWYVDGVEVHNAKTKPCEEQYGSTYRCVSVLTVLHQDWLNGKEYKCKVSNKALPAPIEKTISKAKGQPREPQVYTLPPSREEMTKNQVSLTCLVKGFYPSDIAVEWESNGQPENNYKTTPPVLDSDGSFFLYSKLTVDKSRWQQGNVFSCSVMHEALHNHYTQKSLSLSPGK

SEQ ID NO: 514 - protein, 230 aa, Artificial Sequence
  Synthetic Polypeptide
EVQLVESGGGLVQPGGSLRLSCAASGFTFSNAWMSWVRQAPGKGLEWVGRIRSRSYGGTTDYAAPVKGRFTISRDDSKNTLFLQMNSLKTEDTAVYYCTTPSYSGSYYNYFSVMDVWGQGTTVTVSSASTKGPSVFPLAPSSKSTSGGTAALGCLVKDYFPEPVTVSWNSGALTSGVHTFPAVLQSSGLYSLSSVVTVPSSSLGTQTYICNVNHKPSNTKVDKKVEPKSC

SEQ ID NO: 515 - protein, 214 aa, Artificial Sequence
  Synthetic Polypeptide
DIQMTQSPSSLSASVGDRVTITCRTSQSISSYLNWYQQKPGRAPKLLIFAASSLQGGVPSRFSGSGSGTDFTLTISSLQPEDFATYYCQQTYSMPFTFGGGTKVEIKRTVAAPSVFIFPPSDEQLKSGTASVVCLLNNFYPREAKVQWKVDNALQSGNSQESVTEQDSKDSTYSLSSTLTLSKADYEKHKVYACEVTHQGLSSPVTKSFNRGEC

SEQ ID NO: 516 - protein, 484 aa, Artificial Sequence
  Synthetic Polypeptide
EVQLVESGGGLVQPGGSLRLSCAASGFTFSNAWMSWVRQAPGKGLEWVGRIRSRSYGGTTDYAAPVKGRFTISRDDSKNTLFLQMNSLKTEDTAVYYCTTPSYSGSYYNYFSVMDVWGQGTTVTVSSASTKGPSVFPLAPSSKSTSGGTAALGCLVKDYFPEPVTVSWNSGALTSGVHTFPAVLQSSGLYSLSSVVTVPSSSLGTQTYICNVNHKPSNTKVDKKVEPKSCGGGGSGGGGSGGGGSGGGGSGGGGSGGGGSGGGGSGGGGSDIQMTQSPSSLSASVGDRVTITCRTSQSISSYLNWYQQKPGRAPKLLIFAASSLQGGVPSRFSGSGSGTDFTLTISSLQPEDFATYYCQQTYSMPFTFGGGTKVEIKRTVAAPSVFIFPPSDEQLKSGTASVVCLLNNFYPREAKVQWKVDNALQSGNSQESVTEQDSKDSTYSLSSTLTLSKADYEKHKVYACEVTHQGLSSPVTKSFNRGEC

SEQ ID NO: 517 - protein, 739 aa, Artificial Sequence
  Synthetic Polypeptide
EVQLVESGGGLVQPGGSLRLSCAASGFTFSNAWMSWVRQAPGKGLEWVGRIRSRSYGGTTDYAAPVKGRFTISRDDSKNTLFLQMNSLKTEDTAVYYCTTPSYSGSYYNYFSVMDVWGQGTTVTVSSASTKGPSVFPLAPSSKSTSGGTAALGCLVKDYFPEPVTVSWNSGALTSGVHTFPAVLQSSGLYSLSSVVTVPSSSLGTQTYICNVNHKPSNTKVDKKVEPKSCGGGGSGGGGSGGGGSGGGGSGGGGSGGGGSGGGGSGGGGSDIQMTQSPSSLSASVGDRVTITCRTSQSISSYLNWYQQKPGRAPKLLIFAASSLQGGVPSRFSGSGSGTDFTLTISSLQPEDFATYYCQQTYSMPFTFGGGTKVEIKRTVAAPSVFIFPPSDEQLKSGTASVVCLLNNFYPREAKVQWKVDNALQSGNSQESVTEQDSKDSTYSLSSTLTLSKADYEKHKVYACEVTHQGLSSPVTKSFNRGECSGGGGSEVQLVESGGGLVQPGGSLKLSCAASGFTFNKYAMNWVRQAPGKGLEWVARIRSKYNNYATYYADSVKDRFTISRDDSKNTAYLQMNNLKTEDTAVYYCVRHGNFGNSYISYWAYWGQGTLVTVSSGGGGSGGGGSGGGGSQTVVTQEPSLTVSPGGTVTLTCGSSTGAVTSGNYPNWVQQKPGQAPRGLIGGTKFLAPGTPARFSGSLLGGKAALTLSGVQPEDEAEYYCVLWYSNRWVFGGGTKLTVL

SEQ ID NO: 518 - protein, 1227 aa, Artificial Sequence
  Synthetic Polypeptide
EVQLVESGGGLVQPGGSLRLSCAASGFTFSNAWMSWVRQAPGKGLEWVGRIRSRSYGGTTDYAAPVKGRFTISRDDSKNTLFLQMNSLKTEDTAVYYCTTPSYSGSYYNYFSVMDVWGQGTTVTVSSASTKGPSVFPLAPSSKSTSGGTAALGCLVKDYFPEPVTVSWNSGALTSGVHTFPAVLQSSGLYSLSSVVTVPSSSLGTQTYICNVNHKPSNTKVDKKVEPKSCGGGGSGGGGSGGGGSGGGGSGGGGSGGGGSGGGGSGGGGSDIQMTQSPSSLSASVGDRVTITCRTSQSISSYLNWYQQKPGRAPKLLIFAASSLQGGVPSRFSGSGSGTDFTLTISSLQPEDFATYYCQQTYSMPFTFGGGTKVEIKRTVAAPSVFIFPPSDEQLKSGTASVVCLLNNFYPREAKVQWKVDNALQSGNSQESVTEQDSKDSTYSLSSTLTLSKADYEKHKVYACEVTHQGLSSPVTKSFNRGECSGGGGSEVQLVESGGGLVQPGGSLKLSCAASGFTFNKYAMNWVRQAPGKGLEWVARIRSKYNNYATYYADSVKDRFTISRDDSKNTAYLQMNNLKTEDTAVYYCVRHGNFGNSYISYWAYWGQGTLVTVSSGGGGSGGGGSGGGGSQTVVTQEPSLTVSPGGTVTLTCGSSTGAVTSGNYPNWVQQKPGQAPRGLIGGTKFLAPGTPARFSGSLLGGKAALTLSGVQPEDEAEYYCVLWYSNRWVFGGGTKLTVLGGGGDKTHTCPPCPAPELLGGPSVFLFPPKPKDTLMISRTPEVTCVVVDVSHEDPEVKFNWYVDGVEVHNAKTKPCEEQYGSTYRCVSVLTVLHQDWLNGKEYKCKVSNKALPAPIEKTISKAKGQPREPQVYTLPPSREEMTKNQVSLTCLVKGFYPSDIAVEWESNGQPENNYKTTPPVLDSDGSFFLYSKLTVDKSRWQQGNVFSCSVMHEALHNHYTQKSLSLSPGKGGGGSGGGGSGGGGSGGGGSGGGGSGGGGSDKTHTCPPCPAPELLGGPSVFLFPPKPKDTLMISRTPEVTCVVVDVSHEDPEVKFNWYVDGVEVHNAKTKPCEEQYGSTYRCVSVLTVLHQDWLNGKEYKCKVSNKALPAPIEKTISKAKGQPREPQVYTLPPSREEMTKNQVSLTCLVKGFYPSDIAVEWESNGQPENNYKTTPPVLDSDGSFFLYSKLTVDKSRWQQGNVFSCSVMHEALHNHYTQKSLSLSPGK

SEQ ID NO: 519 - protein, 5 aa, Artificial Sequence
  Synthetic Polypeptide
SFYWS

SEQ ID NO: 520 - protein, 16 aa, Artificial Sequence
  Synthetic Polypeptide
RISSSGDVDYNPSLKS

SEQ ID NO: 521 - protein, 6 aa, Artificial Sequence
  Synthetic Polypeptide
EGGFYY

SEQ ID NO: 522 - protein, 12 aa, Artificial Sequence
  Synthetic Polypeptide
RASQSVSSSYLA

SEQ ID NO: 523 - protein, 7 aa, Artificial Sequence
  Synthetic Polypeptide
GASSRAT

SEQ ID NO: 524 - protein, 9 aa, Artificial Sequence
  Synthetic Polypeptide
QQYGSSPIT

SEQ ID NO: 525 - protein, 114 aa, Artificial Sequence
  Synthetic Polypeptide
QVQLQESGPGLVKPSETLSLTCTVSGGSISSFYWSWIRQPPGKCLEWIGRISSSGDVDYNPSLKSRVTISVDTSKNQFSLKLSSVTAADTAVYYCAREGGFYYWGQGTLVTVSS

SEQ ID NO: 526 - protein, 108 aa, Artificial Sequence
  Synthetic Polypeptide
EIVLTQSPGTLSLSPGERATLSCRASQSVSSSYLAWYQQKPGQAPRLLIYGASSRATGIPDRFSGSGSGTDFTLTISRLEPEDFAVYYCQQYGSSPITFGCGTKLEIK

SEQ ID NO: 527 - protein, 237 aa, Artificial Sequence
  Synthetic Polypeptide
QVQLQESGPGLVKPSETLSLTCTVSGGSISSFYWSWIRQPPGKCLEWIGRISSSGDVDYNPSLKSRVTISVDTSKNQFSLKLSSVTAADTAVYYCAREGGFYYWGQGTLVTVSSGGGGSGGGGSGGGGSEIVLTQSPGTLSLSPGERATLSCRASQSVSSSYLAWYQQKPGQAPRLLIYGASSRATGIPDRFSGSGSGTDFTLTISRLEPEDFAVYYCQQYGSSPITFGCGTKLEIK

SEQ ID NO: 528 - protein, 492 aa, Artificial Sequence
  Synthetic Polypeptide
QVQLQESGPGLVKPSETLSLTCTVSGGSISSFYWSWIRQPPGKCLEWIGRISSSGDVDYNPSLKSRVTISVDTSKNQFSLKLSSVTAADTAVYYCAREGGFYYWGQGTLVTVSSGGGGSGGGGSGGGGSEIVLTQSPGTLSLSPGERATLSCRASQSVSSSYLAWYQQKPGQAPRLLIYGASSRATGIPDRFSGSGSGTDFTLTISRLEPEDFAVYYCQQYGSSPITFGCGTKLEIKSGGGGSEVQLVESGGGLVQPGGSLKLSCAASGFTFNKYAMNWVRQAPGKGLEWVARIRSKYNNYATYYADSVKDRFTISRDDSKNTAYLQMNNLKTEDTAVYYCVRHGNFGNSYISYWAYWGQGTLVTVSSGGGGSGGGGSGGGGSQTVVTQEPSLTVSPGGTVTLTCGSSTGAVTSGNYPNWVQQKPGQAPRGLIGGTKFLAPGTPARFSGSLLGGKAALTLSGVQPEDEAEYYCVLWYSNRWVFGGGTKLTVL

SEQ ID NO: 529 - protein, 980 aa, Artificial Sequence
  Synthetic Polypeptide
QVQLQESGPGLVKPSETLSLTCTVSGGSISSFYWSWIRQPPGKCLEWIGRISSSGDVDYNPSLKSRVTISVDTSKNQFSLKLSSVTAADTAVYYCAREGGFYYWGQGTLVTVSSGGGGSGGGGSGGGGSEIVLTQSPGTLSLSPGERATLSCRASQSVSSSYLAWYQQKPGQAPRLLIYGASSRATGIPDRFSGSGSGTDFTLTISRLEPEDFAVYYCQQYGSSPITFGCGTKLEIKSGGGGSEVQLVESGGGLVQPGGSLKLSCAASGFTFNKYAMNWVRQAPGKGLEWVARIRSKYNNYATYYADSVKDRFTISRDDSKNTAYLQMNNLKTEDTAVYYCVRHGNFGNSYISYWAYWGQGTLVTVSSGGGGSGGGGSGGGGSQTVVTQEPSLTVSPGGTVTLTCGSSTGAVTSGNYPNWVQQKPGQAPRGLIGGTKFLAPGTPARFSGSLLGGKAALTLSGVQPEDEAEYYCVLWYSNRWVFGGGTKLTVLGGGGDKTHTCPPCPAPELLGGPSVFLFPPKPKDTLMISRTPEVTCVVVDVSHEDPEVKFNWYVDGVEVHNAKTKPCEEQYGSTYRCVSVLTVLHQDWLNGKEYKCKVSNKALPAPIEKTISKAKGQPREPQVYTLPPSREEMTKNQVSLTCLVKGFYPSDIAVEWESNGQPENNYKTTPPVLDSDGSFFLYSKLTVDKSRWQQGNVFSCSVMHEALHNHYTQKSLSLSPGKGGGGSGGGGSGGGGSGGGGSGGGGSGGGGSDKTHTCPPCPAPELLGGPSVFLFPPKPKDTLMISRTPEVTCVVVDVSHEDPEVKFNWYVDGVEVHNAKTKPCEEQYGSTYRCVSVLTVLHQDWLNGKEYKCKVSNKALPAPIEKTISKAKGQPREPQVYTLPPSREEMTKNQVSLTCLVKGFYPSDIAVEWESNGQPENNYKTTPPVLDSDGSFFLYSKLTVDKSRWQQGNVFSCSVMHEALHNHYTQKSLSLSPGK

SEQ ID NO: 530 - protein, 5 aa, Artificial Sequence
  Synthetic Polypeptide
GYYWS

SEQ ID NO: 531 - protein, 16 aa, Artificial Sequence
  Synthetic Polypeptide
EINHRGSTNYNPSLKS

SEQ ID NO: 532 - protein, 14 aa, Artificial Sequence
  Synthetic Polypeptide
GYSSSWYTGYVFDY

SEQ ID NO: 533 - protein, 14 aa, Artificial Sequence
  Synthetic Polypeptide
TGTSSDVFGYDYVS

SEQ ID NO: 534 - protein, 7 aa, Artificial Sequence
  Synthetic Polypeptide
DVSNRPS

SEQ ID NO: 535 - protein, 10 aa, Artificial Sequence
  Synthetic Polypeptide
SSYKSSSTVV

SEQ ID NO: 536 - protein, 122 aa, Artificial Sequence
  Synthetic Polypeptide
QVQLQQWGAGLLKPSETLSLTCAVYGGSFSGYYWSWIRQPPGKCLEWIGEINHRGSTNYNPSLKSRVTISGDTSKNQFSLKLSSVNAADTAVYYCARGYSSSWYTGYVFDYWGQGTLVTVSS

SEQ ID NO: 537 - protein, 110 aa, Artificial Sequence
  Synthetic Polypeptide
QSALTQPASVSGSPGQSITISCTGTSSDVFGYDYVSWYQQHPGKAPKLMIYDVSNRPSGVSNRFSGSKSGNAASLTISGLQAEDEADYYCSSYKSSSTVVFGCGTKLTVL

SEQ ID NO: 538 - protein, 247 aa, Artificial Sequence
  Synthetic Polypeptide
QVQLQQWGAGLLKPSETLSLTCAVYGGSFSGYYWSWIRQPPGKCLEWIGEINHRGSTNYNPSLKSRVTISGDTSKNQFSLKLSSVNAADTAVYYCARGYSSSWYTGYVFDYWGQGTLVTVSSGGGGSGGGGSGGGGSQSALTQPASVSGSPGQSITISCTGTSSDVFGYDYVSWYQQHPGKAPKLMIYDVSNRPSGVSNRFSGSKSGNAASLTISGLQAEDEADYYCSSYKSSSTVVFGCGTKLTVL

SEQ ID NO: 539 - protein, 502 aa, Artificial Sequence
  Synthetic Polypeptide
QVQLQQWGAGLLKPSETLSLTCAVYGGSFSGYYWSWIRQPPGKCLEWIGEINHRGSTNYNPSLKSRVTISGDTSKNQFSLKLSSVNAADTAVYYCARGYSSSWYTGYVFDYWGQGTLVTVSSGGGGSGGGGSGGGGSQSALTQPASVSGSPGQSITISCTGTSSDVFGYDYVSWYQQHPGKAPKLMIYDVSNRPSGVSNRFSGSKSGNAASLTISGLQAEDEADYYCSSYKSSSTVVFGCGTKLTVLSGGGGSEVQLVESGGGLVQPGGSLKLSCAASGFTFNKYAMNWVRQAPGKGLEWVARIRSKYNNYATYYADSVKDRFTISRDDSKNTAYLQMNNLKTEDTAVYYCVRHGNFGNSYISYWAYWGQGTLVTVSSGGGGSGGGGSGGGGSQTVVTQEPSLTVSPGGTVTLTCGSSTGAVTSGNYPNWVQQKPGQAPRGLIGGTKFLAPGTPARFSGSLLGGKAALTLSGVQPEDEAEYYCVLWYSNRWVFGGGTKLTVL

SEQ ID NO: 540 - protein, 990 aa, Artificial Sequence
  Synthetic Polypeptide
QVQLQQWGAGLLKPSETLSLTCAVYGGSFSGYYWSWIRQPPGKCLEWIGEINHRGSTNYNPSLKSRVTISGDTSKNQFSLKLSSVNAADTAVYYCARGYSSSWYTGYVFDYWGQGTLVTVSSGGGGSGGGGSGGGGSQSALTQPASVSGSPGQSITISCTGTSSDVFGYDYVSWYQQHPGKAPKLMIYDVSNRPSGVSNRFSGSKSGNAASLTISGLQAEDEADYYCSSYKSSSTVVFGCGTKLTVLSGGGGSEVQLVESGGGLVQPGGSLKLSCAASGFTFNKYAMNWVRQAPGKGLEWVARIRSKYNNYATYYADSVKDRFTISRDDSKNTAYLQMNNLKTEDTAVYYCVRHGNFGNSYISYWAYWGQGTLVTVSSGGGGSGGGGSGGGGSQTVVTQEPSLTVSPGGTVTLTCGSSTGAVTSGNYPNWVQQKPGQAPRGLIGGTKFLAPGTPARFSGSLLGGKAALTLSGVQPEDEAEYYCVLWYSNRWVFGGGTKLTVLGGGGDKTHTCPPCPAPELLGGPSVFLFPPKPKDTLMISRTPEVTCVVVDVSHEDPEVKFNWYVDGVEVHNAKTKPCEEQYGSTYRCVSVLTVLHQDWLNGKEYKCKVSNKALPAPIEKTISKAKGQPREPQVYTLPPSREEMTKNQVSLTCLVKGFYPSDIAVEWESNGQPENNYKTTPPVLDSDGSFFLYSKLTVDKSRWQQGNVFSCSVMHEALHNHYTQKSLSLSPGKGGGGSGGGGSGGGGSGGGGSGGGGSGGGGSDKTHTCPPCPAPELLGGPSVFLFPPKPKDTLMISRTPEVTCVVVDVSHEDPEVKFNWYVDGVEVHNAKTKPCEEQYGSTYRCVSVLTVLHQDWLNGKEYKCKVSNKALPAPIEKTISKAKGQPREPQVYTLPPSREEMTKNQVSLTCLVKGFYPSDIAVEWESNGQPENNYKTTPPVLDSDGSFFLYSKLTVDKSRWQQGNVFSCSVMHEALHNHYTQKSLSLSPGK

SEQ ID NO: 541 - protein, 5 aa, Artificial Sequence
  Synthetic Polypeptide
SYGIS

SEQ ID NO: 542 - protein, 17 aa, Artificial Sequence
  Synthetic Polypeptide
WISAYSGNAIYAQKLQG

SEQ ID NO: 543 - protein, 13 aa, Artificial Sequence
  Synthetic Polypeptide
DPDYYGSGSYSDY

SEQ ID NO: 544 - protein, 11 aa, Artificial Sequence
  Synthetic Polypeptide
RASQSVSSNLA

SEQ ID NO: 545 - protein, 7 aa, Artificial Sequence
  Synthetic Polypeptide
GASSRAT

SEQ ID NO: 546 - protein, 10 aa, Artificial Sequence
  Synthetic Polypeptide
QQYHSWPLLT

SEQ ID NO: 547 - protein, 122 aa, Artificial Sequence
  Synthetic Polypeptide
QVQLVQSGAEVKKPGASVKVSCKASGYTFTSYGISWVRQAPGQCLEWMGWISAYSGNAIYAQKLQGRVTMTRDTSTSTAYMELRSLRSDDTAVYYCARDPDYYGSGSYSDYWGQGTLVTVSS

SEQ ID NO: 548 - protein, 108 aa, Artificial Sequence
  Synthetic Polypeptide
EIVLTQSPATLSVSPGERATLSCRASQSVSSNLAWYQQKPGQAPRLLIYGASSRATGIPARFSGSGSGTEFTLTISSLQSEDFAVYYCQQYHSWPLLTFGCGTKVEIK

SEQ ID NO: 549 - protein, 245 aa, Artificial Sequence
  Synthetic Polypeptide
QVQLVQSGAEVKKPGASVKVSCKASGYTFTSYGISWVRQAPGQCLEWMGWISAYSGNAIYAQKLQGRVTMTRDTSTSTAYMELRSLRSDDTAVYYCARDPDYYGSGSYSDYWGQGTLVTVSSGGGGSGGGGSGGGGSEIVLTQSPATLSVSPGERATLSCRASQSVSSNLAWYQQKPGQAPRLLIYGASSRATGIPARFSGSGSGTEFTLTISSLQSEDFAVYYCQQYHSWPLLTFGCGTKVEIK

SEQ ID NO: 550 - protein, 500 aa, Artificial Sequence
  Synthetic Polypeptide
QVQLVQSGAEVKKPGASVKVSCKASGYTFTSYGISWVRQAPGQCLEWMGWISAYSGNAIYAQKLQGRVTMTRDTSTSTAYMELRSLRSDDTAVYYCARDPDYYGSGSYSDYWGQGTLVTVSSGGGGSGGGGSGGGGSEIVLTQSPATLSVSPGERATLSCRASQSVSSNLAWYQQKPGQAPRLLIYGASSRATGIPARFSGSGSGTEFTLTISSLQSEDFAVYYCQQYHSWPLLTFGCGTKVEIKSGGGGSEVQLVESGGGLVQPGGSLKLSCAASGFTFNKYAMNWVRQAPGKGLEWVARIRSKYNNYATYYADSVKDRFTISRDDSKNTAYLQMNNLKTEDTAVYYCVRHGNFGNSYISYWAYWGQGTLVTVSSGGGGSGGGGSGGGGSQTVVTQEPSLTVSPGGTVTLTCGSSTGAVTSGNYPNWVQQKPGQAPRGLIGGTKFLAPGTPARFSGSLLGGKAALTLSGVQPEDEAEYYCVLWYSNRWVFGGGTKLTVL

SEQ ID NO: 551 - protein, 988 aa, Artificial Sequence
  Synthetic Polypeptide
QVQLVQSGAEVKKPGASVKVSCKASGYTFTSYGISWVRQAPGQCLEWMGWISAYSGNAIYAQKLQGRVTMTRDTSTSTAYMELRSLRSDDTAVYYCARDPDYYGSGSYSDYWGQGTLVTVSSGGGGSGGGGSGGGGSEIVLTQSPATLSVSPGERATLSCRASQSVSSNLAWYQQKPGQAPRLLIYGASSRATGIPARFSGSGSGTEFTLTISSLQSEDFAVYYCQQYHSWPLLTFGCGTKVEIKSGGGGSEVQLVESGGGLVQPGGSLKLSCAASGFTFNKYAMNWVRQAPGKGLEWVARIRSKYNNYATYYADSVKDRFTISRDDSKNTAYLQMNNLKTEDTAVYYCVRHGNFGNSYISYWAYWGQGTLVTVSSGGGGSGGGGSGGGGSQTVVTQEPSLTVSPGGTVTLTCGSSTGAVTSGNYPNWVQQKPGQAPRGLIGGTKFLAPGTPARFSGSLLGGKAALTLSGVQPEDEAEYYCVLWYSNRWVFGGGTKLTVLGGGGDKTHTCPPCPAPELLGGPSVFLFPPKPKDTLMISRTPEVTCVVVDVSHEDPEVKFNWYVDGVEVHNAKTKPCEEQYGSTYRCVSVLTVLHQDWLNGKEYKCKVSNKALPAPIEKTISKAKGQPREPQVYTLPPSREEMTKNQVSLTCLVKGFYPSDIAVEWESNGQPENNYKTTPPVLDSDGSFFLYSKLTVDKSRWQQGNVFSCSVMHEALHNHYTQKSLSLSPGKGGGGSGGGGSGGGGSGGGGSGGGGSGGGGSDKTHTCPPCPAPELLGGPSVFLFPPKPKDTLMISRTPEVTCVVVDVSHEDPEVKFNWYVDGVEVHNAKTKPCEEQYGSTYRCVSVLTVLHQDWLNGKEYKCKVSNKALPAPIEKTISKAKGQPREPQVYTLPPSREEMTKNQVSLTCLVKGFYPSDIAVEWESNGQPENNYKTTPPVLDSDGSFFLYSKLTVDKSRWQQGNVFSCSVMHEALHNHYTQKSLSLSPGK

SEQ ID NO: 552 - protein, 5 aa, Artificial Sequence
  Synthetic Polypeptide
SYWMH

SEQ ID NO: 553 - protein, 17 aa, Artificial Sequence
  Synthetic Polypeptide
YITPSTGYTEYNQKFKG

SEQ ID NO: 554 - protein, 10 aa, Artificial Sequence
  Synthetic Polypeptide
VHDYDRAMEY

SEQ ID NO: 555 - protein, 11 aa, Artificial Sequence
  Synthetic Polypeptide
KASQDINKYIA

SEQ ID NO: 556 - protein, 7 aa, Artificial Sequence
  Synthetic Polypeptide
YTSTLQP

SEQ ID NO: 557 - protein, 9 aa, Artificial Sequence
  Synthetic Polypeptide
LQYASYPFT

SEQ ID NO: 558 - protein, 119 aa, Artificial Sequence
  Synthetic Polypeptide
QVQLVQSGAEVKKPGASVKVSCKASGYTFTSYWMHWVRQAPGQCLEWIGYITPSTGYTEYNQKFKGRVTMTRDKSTSTVYMELSSLTSEDTAVYYCARVHDYDRAMEYWGQGTTVTVSS

SEQ ID NO: 559 - protein, 107 aa, Artificial Sequence
  Synthetic Polypeptide
DIQMTQSPSSLSASVGDRVTITCKASQDINKYIAWYQQKPGKGPKLLIYYTSTLQPGVPSRFSGSGSGTDFTFTISSLQPEDIATYYCLQYASYPFTFGCGTRLEIK

SEQ ID NO: 560 - protein, 241 aa, Artificial Sequence
  Synthetic Polypeptide
QVQLVQSGAEVKKPGASVKVSCKASGYTFTSYWMHWVRQAPGQCLEWIGYITPSTGYTEYNQKFKGRVTMTRDKSTSTVYMELSSLTSEDTAVYYCARVHDYDRAMEYWGQGTTVTVSSGGGGSGGGGSGGGGSDIQMTQSPSSLSASVGDRVTITCKASQDINKYIAWYQQKPGKGPKLLIYYTSTLQPGVPSRFSGSGSGTDFTFTISSLQPEDIATYYCLQYASYPFTFGCGTRLEIK

SEQ ID NO: 561 - protein, 496 aa, Artificial Sequence
  Synthetic Polypeptide
QVQLVQSGAEVKKPGASVKVSCKASGYTFTSYWMHWVRQAPGQCLEWIGYITPSTGYTEYNQKFKGRVTMTRDKSTSTVYMELSSLTSEDTAVYYCARVHDYDRAMEYWGQGTTVTVSSGGGGSGGGGSGGGGSDIQMTQSPSSLSASVGDRVTITCKASQDINKYIAWYQQKPGKGPKLLIYYTSTLQPGVPSRFSGSGSGTDFTFTISSLQPEDIATYYCLQYASYPFTFGCGTRLEIKSGGGGSEVQLVESGGGLVQPGGSLKLSCAASGFTFNKYAMNWVRQAPGKGLEWVARIRSKYNNYATYYADSVKDRFTISRDDSKNTAYLQMNNLKTEDTAVYYCVRHGNFGNSYISYWAYWGQGTLVTVSSGGGGSGGGGSGGGGSQTVVTQEPSLTVSPGGTVTLTCGSSTGAVTSGNYPNWVQQKPGQAPRGLIGGTKFLAPGTPARFSGSLLGGKAALTLSGVQPEDEAEYYCVLWYSNRWVFGGGTKLTVL

SEQ ID NO: 562 - protein, 984 aa, Artificial Sequence
  Synthetic Polypeptide
QVQLVQSGAEVKKPGASVKVSCKASGYTFTSYWMHWVRQAPGQCLEWIGYITPSTGYTEYNQKFKGRVTMTRDKSTSTVYMELSSLTSEDTAVYYCARVHDYDRAMEYWGQGTTVTVSSGGGGSGGGGSGGGGSDIQMTQSPSSLSASVGDRVTITCKASQDINKYIAWYQQKPGKGPKLLIYYTSTLQPGVPSRFSGSGSGTDFTFTISSLQPEDIATYYCLQYASYPFTFGCGTRLEIKSGGGGSEVQLVESGGGLVQPGGSLKLSCAASGFTFNKYAMNWVRQAPGKGLEWVARIRSKYNNYATYYADSVKDRFTISRDDSKNTAYLQMNNLKTEDTAVYYCVRHGNFGNSYISYWAYWGQGTLVTVSSGGGGSGGGGSGGGGSQTVVTQEPSLTVSPGGTVTLTCGSSTGAVTSGNYPNWVQQKPGQAPRGLIGGTKFLAPGTPARFSGSLLGGKAALTLSGVQPEDEAEYYCVLWYSNRWVFGGGTKLTVLGGGGDKTHTCPPCPAPELLGGPSVFLFPPKPKDTLMISRTPEVTCVVVDVSHEDPEVKFNWYVDGVEVHNAKTKPCEEQYGSTYRCVSVLTVLHQDWLNGKEYKCKVSNKALPAPIEKTISKAKGQPREPQVYTLPPSREEMTKNQVSLTCLVKGFYPSDIAVEWESNGQPENNYKTTPPVLDSDGSFFLYSKLTVDKSRWQQGNVFSCSVMHEALHNHYTQKSLSLSPGKGGGGSGGGGSGGGGSGGGGSGGGGSGGGGSDKTHTCPPCPAPELLGGPSVFLFPPKPKDTLMISRTPEVTCVVVDVSHEDPEVKFNWYVDGVEVHNAKTKPCEEQYGSTYRCVSVLTVLHQDWLNGKEYKCKVSNKALPAPIEKTISKAKGQPREPQVYTLPPSREEMTKNQVSLTCLVKGFYPSDIAVEWESNGQPENNYKTTPPVLDSDGSFFLYSKLTVDKSRWQQGNVFSCSVMHEALHNHYTQKSLSLSPGK

SEQ ID NO: 563 - protein, 222 aa, Artificial Sequence
  Synthetic Polypeptide
QVQLVQSGAEVKKPGASVKVSCKASGYTFTSYWMHWVRQAPGQGLEWIGYITPSTGYTEYNQKFKGRVTMTRDKSTSTVYMELSSLTSEDTAVYYCARVHDYDRAMEYWGQGTTVTVSSASTKGPSVFPLAPSSKSTSGGTAALGCLVKDYFPEPVTVSWNSGALTSGVHTFPAVLQSSGLYSLSSVVTVPSSSLGTQTYICNVNHKPSNTKVDKKVEPKSC

SEQ ID NO: 564 - protein, 214 aa, Artificial Sequence
  Synthetic Polypeptide
DIQMTQSPSSLSASVGDRVTITCKASQDINKYIAWYQQKPGKGPKLLIYYTSTLQPGVPSRFSGSGSGTDFTFTISSLQPEDIATYYCLQYASYPFTFGQGTRLEIKRTVAAPSVFIFPPSDEQLKSGTASVVCLLNNFYPREAKVQWKVDNALQSGNSQESVTEQDSKDSTYSLSSTLTLSKADYEKHKVYACEVTHQGLSSPVTKSFNRGEC

SEQ ID NO: 565 - protein, 476 aa, Artificial Sequence
  Synthetic Polypeptide
QVQLVQSGAEVKKPGASVKVSCKASGYTFTSYWMHWVRQAPGQGLEWIGYITPSTGYTEYNQKFKGRVTMTRDKSTSTVYMELSSLTSEDTAVYYCARVHDYDRAMEYWGQGTTVTVSSASTKGPSVFPLAPSSKSTSGGTAALGCLVKDYFPEPVTVSWNSGALTSGVHTFPAVLQSSGLYSLSSVVTVPSSSLGTQTYICNVNHKPSNTKVDKKVEPKSCGGGGSGGGGSGGGGSGGGGSGGGGSGGGGSGGGGSGGGGSDIQMTQSPSSLSASVGDRVTITCKASQDINKYIAWYQQKPGKGPKLLIYYTSTLQPGVPSRFSGSGSGTDFTFTISSLQPEDIATYYCLQYASYPFTFGQGTRLEIKRTVAAPSVFIFPPSDEQLKSGTASVVCLLNNFYPREAKVQWKVDNALQSGNSQESVTEQDSKDSTYSLSSTLTLSKADYEKHKVYACEVTHQGLSSPVTKSFNRGEC

SEQ ID NO: 566 - protein, 731 aa, Artificial Sequence
  Synthetic Polypeptide
QVQLVQSGAEVKKPGASVKVSCKASGYTFTSYWMHWVRQAPGQGLEWIGYITPSTGYTEYNQKFKGRVTMTRDKSTSTVYMELSSLTSEDTAVYYCARVHDYDRAMEYWGQGTTVTVSSASTKGPSVFPLAPSSKSTSGGTAALGCLVKDYFPEPVTVSWNSGALTSGVHTFPAVLQSSGLYSLSSVVTVPSSSLGTQTYICNVNHKPSNTKVDKKVEPKSCGGGGSGGGGSGGGGSGGGGSGGGGSGGGGSGGGGSGGGGSDIQMTQSPSSLSASVGDRVTITCKASQDINKYIAWYQQKPGKGPKLLIYYTSTLQPGVPSRFSGSGSGTDFTFTISSLQPEDIATYYCLQYASYPFTFGQGTRLEIKRTVAAPSVFIFPPSDEQLKSGTASVVCLLNNFYPREAKVQWKVDNALQSGNSQESVTEQDSKDSTYSLSSTLTLSKADYEKHKVYACEVTHQGLSSPVTKSFNRGECSGGGGSEVQLVESGGGLVQPGGSLKLSCAASGFTFNKYAMNWVRQAPGKGLEWVARIRSKYNNYATYYADSVKDRFTISRDDSKNTAYLQMNNLKTEDTAVYYCVRHGNFGNSYISYWAYWGQGTLVTVSSGGGGSGGGGSGGGGSQTVVTQEPSLTVSPGGTVTLTCGSSTGAVTSGNYPNWVQQKPGQAPRGLIGGTKFLAPGTPARFSGSLLGGKAALTLSGVQPEDEAEYYCVLWYSNRWVFGGGTKLTVL

SEQ ID NO: 567 - protein, 1219 aa, Artificial Sequence
  Synthetic Polypeptide
QVQLVQSGAEVKKPGASVKVSCKASGYTFTSYWMHWVRQAPGQGLEWIGYITPSTGYTEYNQKFKGRVTMTRDKSTSTVYMELSSLTSEDTAVYYCARVHDYDRAMEYWGQGTTVTVSSASTKGPSVFPLAPSSKSTSGGTAALGCLVKDYFPEPVTVSWNSGALTSGVHTFPAVLQSSGLYSLSSVVTVPSSSLGTQTYICNVNHKPSNTKVDKKVEPKSCGGGGSGGGGSGGGGSGGGGSGGGGSGGGGSGGGGSGGGGSDIQMTQSPSSLSASVGDRVTITCKASQDINKYIAWYQQKPGKGPKLLIYYTSTLQPGVPSRFSGSGSGTDFTFTISSLQPEDIATYYCLQYASYPFTFGQGTRLEIKRTVAAPSVFIFPPSDEQLKSGTASVVCLLNNFYPREAKVQWKVDNALQSGNSQESVTEQDSKDSTYSLSSTLTLSKADYEKHKVYACEVTHQGLSSPVTKSFNRGECSGGGGSEVQLVESGGGLVQPGGSLKLSCAASGFTFNKYAMNWVRQAPGKGLEWVARIRSKYNNYATYYADSVKDRFTISRDDSKNTAYLQMNNLKTEDTAVYYCVRHGNFGNSYISYWAYWGQGTLVTVSSGGGGSGGGGSGGGGSQTVVTQEPSLTVSPGGTVTLTCGSSTGAVTSGNYPNWVQQKPGQAPRGLIGGTKFLAPGTPARFSGSLLGGKAALTLSGVQPEDEAEYYCVLWYSNRWVFGGGTKLTVLGGGGDKTHTCPPCPAPELLGGPSVFLFPPKPKDTLMISRTPEVTCVVVDVSHEDPEVKFNWYVDGVEVHNAKTKPCEEQYGSTYRCVSVLTVLHQDWLNGKEYKCKVSNKALPAPIEKTISKAKGQPREPQVYTLPPSREEMTKNQVSLTCLVKGFYPSDIAVEWESNGQPENNYKTTPPVLDSDGSFFLYSKLTVDKSRWQQGNVFSCSVMHEALHNHYTQKSLSLSPGKGGGGSGGGGSGGGGSGGGGSGGGGSGGGGSDKTHTCPPCPAPELLGGPSVFLFPPKPKDTLMISRTPEVTCVVVDVSHEDPEVKFNWYVDGVEVHNAKTKPCEEQYGSTYRCVSVLTVLHQDWLNGKEYKCKVSNKALPAPIEKTISKAKGQPREPQVYTLPPSREEMTKNQVSLTCLVKGFYPSDIAVEWESNGQPENNYKTTPPVLDSDGSFFLYSKLTVDKSRWQQGNVFSCSVMHEALHNHYTQKSLSLSPGK

SEQ ID NO: 568 - protein, 225 aa, Artificial Sequence
  Synthetic Polypeptide
QVQLQQWGAGLLKPSETLSLTCAVYGGSFSGYYWSWIRQPPGKGLEWIGEINHRGSTNYNPSLKSRVTISGDTSKNQFSLKLSSVNAADTAVYYCARGYSSSWYTGYVFDYWGQGTLVTVSSASTKGPSVFPLAPSSKSTSGGTAALGCLVKDYFPEPVTVSWNSGALTSGVHTFPAVLQSSGLYSLSSVVTVPSSSLGTQTYICNVNHKPSNTKVDKKVEPKSC

SEQ ID NO: 569 - protein, 216 aa, Artificial Sequence
  Synthetic Polypeptide
QSALTQPASVSGSPGQSITISCTGTSSDVFGYDYVSWYQQHPGKAPKLMIYDVSNRPSGVSNRFSGSKSGNAASLTISGLQAEDEADYYCSSYKSSSTVVFGGGTKLTVLGQPKAAPSVTLFPPSSEELQANKATLVCLISDFYPGAVTVAWKADSSPVKAGVETTTPSKQSNNKYAASSYLSLTPEQWKSHRSYSCQVTHEGSTVEKTVAPTECS

SEQ ID NO: 570 - protein, 481 aa, Artificial Sequence
  Synthetic Polypeptide
QVQLQQWGAGLLKPSETLSLTCAVYGGSFSGYYWSWIRQPPGKGLEWIGEINHRGSTNYNPSLKSRVTISGDTSKNQFSLKLSSVNAADTAVYYCARGYSSSWYTGYVFDYWGQGTLVTVSSASTKGPSVFPLAPSSKSTSGGTAALGCLVKDYFPEPVTVSWNSGALTSGVHTFPAVLQSSGLYSLSSVVTVPSSSLGTQTYICNVNHKPSNTKVDKKVEPKSCGGGGSGGGGSGGGGSGGGGSGGGGSGGGGSGGGGSGGGGSQSALTQPASVSGSPGQSITISCTGTSSDVFGYDYVSWYQQHPGKAPKLMIYDVSNRPSGVSNRFSGSKSGNAASLTISGLQAEDEADYYCSSYKSSSTVVFGGGTKLTVLGQPKAAPSVTLFPPSSEELQANKATLVCLISDFYPGAVTVAWKADSSPVKAGVETTTPSKQSNNKYAASSYLSLTPEQWKSHRSYSCQVTHEGSTVEKTVAPTECS

SEQ ID NO: 571 - protein, 736 aa, Artificial Sequence
  Synthetic Polypeptide
QVQLQQWGAGLLKPSETLSLTCAVYGGSFSGYYWSWIRQPPGKGLEWIGEINHRGSTNYNPSLKSRVTISGDTSKNQFSLKLSSVNAADTAVYYCARGYSSSWYTGYVFDYWGQGTLVTVSSASTKGPSVFPLAPSSKSTSGGTAALGCLVKDYFPEPVTVSWNSGALTSGVHTFPAVLQSSGLYSLSSVVTVPSSSLGTQTYICNVNHKPSNTKVDKKVEPKSCGGGGSGGGGSGGGGSGGGGSGGGGSGGGGSGGGGSGGGGSQSALTQPASVSGSPGQSITISCTGTSSDVFGYDYVSWYQQHPGKAPKLMIYDVSNRPSGVSNRFSGSKSGNAASLTISGLQAEDEADYYCSSYKSSSTVVFGGGTKLTVLGQPKAAPSVTLFPPSSEELQANKATLVCLISDFYPGAVTVAWKADSSPVKAGVETTTPSKQSNNKYAASSYLSLTPEQWKSHRSYSCQVTHEGSTVEKTVAPTECSSGGGGSEVQLVESGGGLVQPGGSLKLSCAASGFTFNKYAMNWVRQAPGKGLEWVARIRSKYNNYATYYADSVKDRFTISRDDSKNTAYLQMNNLKTEDTAVYYCVRHGNFGNSYISYWAYWGQGTLVTVSSGGGGSGGGGSGGGGSQTVVTQEPSLTVSPGGTVTLTCGSSTGAVTSGNYPNWVQQKPGQAPRGLIGGTKFLAPGTPARFSGSLLGGKAALTLSGVQPEDEAEYYCVLWYSNRWVFGGGTKLTVL

SEQ ID NO: 572 - protein, 1224 aa, Artificial Sequence
  Synthetic Polypeptide
QVQLQQWGAGLLKPSETLSLTCAVYGGSFSGYYWSWIRQPPGKGLEWIGEINHRGSTNYNPSLKSRVTISGDTSKNQFSLKLSSVNAADTAVYYCARGYSSSWYTGYVFDYWGQGTLVTVSSASTKGPSVFPLAPSSKSTSGGTAALGCLVKDYFPEPVTVSWNSGALTSGVHTFPAVLQSSGLYSLSSVVTVPSSSLGTQTYICNVNHKPSNTKVDKKVEPKSCGGGGSGGGGSGGGGSGGGGSGGGGSGGGGSGGGGSGGGGSQSALTQPASVSGSPGQSITISCTGTSSDVFGYDYVSWYQQHPGKAPKLMIYDVSNRPSGVSNRFSGSKSGNAASLTISGLQAEDEADYYCSSYKSSSTVVFGGGTKLTVLGQPKAAPSVTLFPPSSEELQANKATLVCLISDFYPGAVTVAWKADSSPVKAGVETTTPSKQSNNKYAASSYLSLTPEQWKSHRSYSCQVTHEGSTVEKTVAPTECSSGGGGSEVQLVESGGGLVQPGGSLKLSCAASGFTFNKYAMNWVRQAPGKGLEWVARIRSKYNNYATYYADSVKDRFTISRDDSKNTAYLQMNNLKTEDTAVYYCVRHGNFGNSYISYWAYWGQGTLVTVSSGGGGSGGGGSGGGGSQTVVTQEPSLTVSPGGTVTLTCGSSTGAVTSGNYPNWVQQKPGQAPRGLIGGTKFLAPGTPARFSGSLLGGKAALTLSGVQPEDEAEYYCVLWYSNRWVFGGGTKLTVLGGGGDKTHTCPPCPAPELLGGPSVFLFPPKPKDTLMISRTPEVTCVVVDVSHEDPEVKFNWYVDGVEVHNAKTKPCEEQYGSTYRCVSVLTVLHQDWLNGKEYKCKVSNKALPAPIEKTISKAKGQPREPQVYTLPPSREEMTKNQVSLTCLVKGFYPSDIAVEWESNGQPENNYKTTPPVLDSDGSFFLYSKLTVDKSRWQQGNVFSCSVMHEALHNHYTQKSLSLSPGKGGGGSGGGGSGGGGSGGGGSGGGGSGGGGSDKTHTCPPCPAPELLGGPSVFLFPPKPKDTLMISRTPEVTCVVVDVSHEDPEVKFNWYVDGVEVHNAKTKPCEEQYGSTYRCVSVLTVLHQDWLNGKEYKCKVSNKALPAPIEKTISKAKGQPREPQVYTLPPSREEMTKNQVSLTCLVKGFYPSDIAVEWESNGQPENNYKTTPPVLDSDGSFFLYSKLTVDKSRWQQGNVFSCSVMHEALHNHYTQKSLSLSPGK

SEQ ID NO: 573 - protein, 217 aa, Artificial Sequence
  Synthetic Polypeptide
QVQLQESGPGLVKPSETLSLTCTVSGGSISSFYWSWIRQPPGKGLEWIGRISSSGDVDYNPSLKSRVTISVDTSKNQFSLKLSSVTAADTAVYYCAREGGFYYWGQGTLVTVSSASTKGPSVFPLAPSSKSTSGGTAALGCLVKDYFPEPVTVSWNSGALTSGVHTFPAVLQSSGLYSLSSVVTVPSSSLGTQTYICNVNHKPSNTKVDKKVEPKSC

SEQ ID NO: 574 - protein, 215 aa, Artificial Sequence
  Synthetic Polypeptide
EIVLTQSPGTLSLSPGERATLSCRASQSVSSSYLAWYQQKPGQAPRLLIYGASSRATGIPDRFSGSGSGTDFTLTISRLEPEDFAVYYCQQYGSSPITFGQGTKLEIKRTVAAPSVFIFPPSDEQLKSGTASVVCLLNNFYPREAKVQWKVDNALQSGNSQESVTEQDSKDSTYSLSSTLTLSKADYEKHKVYACEVTHQGLSSPVTKSFNRGEC

SEQ ID NO: 575 - protein, 472 aa, Artificial Sequence
  Synthetic Polypeptide
QVQLQESGPGLVKPSETLSLTCTVSGGSISSFYWSWIRQPPGKGLEWIGRISSSGDVDYNPSLKSRVTISVDTSKNQFSLKLSSVTAADTAVYYCAREGGFYYWGQGTLVTVSSASTKGPSVFPLAPSSKSTSGGTAALGCLVKDYFPEPVTVSWNSGALTSGVHTFPAVLQSSGLYSLSSVVTVPSSSLGTQTYICNVNHKPSNTKVDKKVEPKSCGGGGSGGGGSGGGGSGGGGSGGGGSGGGGSGGGGSGGGGSEIVLTQSPGTLSLSPGERATLSCRASQSVSSSYLAWYQQKPGQAPRLLIYGASSRATGIPDRFSGSGSGTDFTLTISRLEPEDFAVYYCQQYGSSPITFGQGTKLEIKRTVAAPSVFIFPPSDEQLKSGTASVVCLLNNFYPREAKVQWKVDNALQSGNSQESVTEQDSKDSTYSLSSTLTLSKADYEKHKVYACEVTHQGLSSPVTKSFNRGEC

SEQ ID NO: 576 - protein, 727 aa, Artificial Sequence
  Synthetic Polypeptide
QVQLQESGPGLVKPSETLSLTCTVSGGSISSFYWSWIRQPPGKGLEWIGRISSSGDVDYNPSLKSRVTISVDTSKNQFSLKLSSVTAADTAVYYCAREGGFYYWGQGTLVTVSSASTKGPSVFPLAPSSKSTSGGTAALGCLVKDYFPEPVTVSWNSGALTSGVHTFPAVLQSSGLYSLSSVVTVPSSSLGTQTYICNVNHKPSNTKVDKKVEPKSCGGGGSGGGGSGGGGSGGGGSGGGGSGGGGSGGGGSGGGGSEIVLTQSPGTLSLSPGERATLSCRASQSVSSSYLAWYQQKPGQAPRLLIYGASSRATGIPDRFSGSGSGTDFTLTISRLEPEDFAVYYCQQYGSSPITFGQGTKLEIKRTVAAPSVFIFPPSDEQLKSGTASVVCLLNNFYPREAKVQWKVDNALQSGNSQESVTEQDSKDSTYSLSSTLTLSKADYEKHKVYACEVTHQGLSSPVTKSFNRGECSGGGGSEVQLVESGGGLVQPGGSLKLSCAASGFTFNKYAMNWVRQAPGKGLEWVARIRSKYNNYATYYADSVKDRFTISRDDSKNTAYLQMNNLKTEDTAVYYCVRHGNFGNSYISYWAYWGQGTLVTVSSGGGGSGGGGSGGGGSQTVVTQEPSLTVSPGGTVTLTCGSSTGAVTSGNYPNWVQQKPGQAPRGLIGGTKFLAPGTPARFSGSLLGGKAALTLSGVQPEDEAEYYCVLWYSNRWVFGGGTKLTVL

SEQ ID NO: 577 - protein, 1215 aa, Artificial Sequence
  Synthetic Polypeptide
QVQLQESGPGLVKPSETLSLTCTVSGGSISSFYWSWIRQPPGKGLEWIGRISSSGDVDYNPSLKSRVTISVDTSKNQFSLKLSSVTAADTAVYYCAREGGFYYWGQGTLVTVSSASTKGPSVFPLAPSSKSTSGGTAALGCLVKDYFPEPVTVSWNSGALTSGVHTFPAVLQSSGLYSLSSVVTVPSSSLGTQTYICNVNHKPSNTKVDKKVEPKSCGGGGSGGGGSGGGGSGGGGSGGGGSGGGGSGGGGSGGGGSEIVLTQSPGTLSLSPGERATLSCRASQSVSSSYLAWYQQKPGQAPRLLIYGASSRATGIPDRFSGSGSGTDFTLTISRLEPEDFAVYYCQQYGSSPITFGQGTKLEIKRTVAAPSVFIFPPSDEQLKSGTASVVCLLNNFYPREAKVQWKVDNALQSGNSQESVTEQDSKDSTYSLSSTLTLSKADYEKHKVYACEVTHQGLSSPVTKSFNRGECSGGGGSEVQLVESGGGLVQPGGSLKLSCAASGFTFNKYAMNWVRQAPGKGLEWVARIRSKYNNYATYYADSVKDRFTISRDDSKNTAYLQMNNLKTEDTAVYYCVRHGNFGNSYISYWAYWGQGTLVTVSSGGGGSGGGGSGGGGSQTVVTQEPSLTVSPGGTVTLTCGSSTGAVTSGNYPNWVQQKPGQAPRGLIGGTKFLAPGTPARFSGSLLGGKAALTLSGVQPEDEAEYYCVLWYSNRWVFGGGTKLTVLGGGGDKTHTCPPCPAPELLGGPSVFLFPPKPKDTLMISRTPEVTCVVVDVSHEDPEVKFNWYVDGVEVHNAKTKPCEEQYGSTYRCVSVLTVLHQDWLNGKEYKCKVSNKALPAPIEKTISKAKGQPREPQVYTLPPSREEMTKNQVSLTCLVKGFYPSDIAVEWESNGQPENNYKTTPPVLDSDGSFFLYSKLTVDKSRWQQGNVFSCSVMHEALHNHYTQKSLSLSPGKGGGGSGGGGSGGGGSGGGGSGGGGSGGGGSDKTHTCPPCPAPELLGGPSVFLFPPKPKDTLMISRTPEVTCVVVDVSHEDPEVKFNWYVDGVEVHNAKTKPCEEQYGSTYRCVSVLTVLHQDWLNGKEYKCKVSNKALPAPIEKTISKAKGQPREPQVYTLPPSREEMTKNQVSLTCLVKGFYPSDIAVEWESNGQPENNYKTTPPVLDSDGSFFLYSKLTVDKSRWQQGNVFSCSVMHEALHNHYTQKSLSLSPGK

SEQ ID NO: 578 - protein, 492 aa, Artificial Sequence
  Synthetic Polypeptide
QVQLVQSGAEVKKPGASVKVSCKASGYTFTSYWMHWVRQAPGQCLEWIGYITPSTGYTEYNQKFKGRVTMTRDKSTSTVYMELSSLTSEDTAVYYCARVHDYDRAMEYWGQGTTVTVSSGGGGSGGGGSGGGGSDIQMTQSPSSLSASVGDRVTITCKASQDINKYIAWYQQKPGKGPKLLIYYTSTLQPGVPSRFSGSGSGTDFTFTISSLQPEDIATYYCLQYASYPFTFGCGTRLEIKSGGGGSQVQLVQSGAEVKKPGASVKVSCKASGYTFTSYGISWVRQAPGQCLEWMGWISAYSGNAIYAQKLQGRVTMTRDTSTSTAYMELRSLRSDDTAVYYCARDPDYYGSGSYSDYWGQGTLVTVSSGGGGSGGGGSGGGGSEIVLTQSPATLSVSPGERATLSCRASQSVSSNLAWYQQKPGQAPRLLIYGASSRATGIPARFSGSGSGTEFTLTISSLQSEDFAVYYCQQYHSWPLLTFGCGTKVEIK

SEQ ID NO: 579 - protein, 747 aa, Artificial Sequence
  Synthetic Polypeptide
QVQLVQSGAEVKKPGASVKVSCKASGYTFTSYWMHWVRQAPGQCLEWIGYITPSTGYTEYNQKFKGRVTMTRDKSTSTVYMELSSLTSEDTAVYYCARVHDYDRAMEYWGQGTTVTVSSGGGGSGGGGSGGGGSDIQMTQSPSSLSASVGDRVTITCKASQDINKYIAWYQQKPGKGPKLLIYYTSTLQPGVPSRFSGSGSGTDFTFTISSLQPEDIATYYCLQYASYPFTFGCGTRLEIKSGGGGSQVQLVQSGAEVKKPGASVKVSCKASGYTFTSYGISWVRQAPGQCLEWMGWISAYSGNAIYAQKLQGRVTMTRDTSTSTAYMELRSLRSDDTAVYYCARDPDYYGSGSYSDYWGQGTLVTVSSGGGGSGGGGSGGGGSEIVLTQSPATLSVSPGERATLSCRASQSVSSNLAWYQQKPGQAPRLLIYGASSRATGIPARFSGSGSGTEFTLTISSLQSEDFAVYYCQQYHSWPLLTFGCGTKVEIKSGGGGSEVQLVESGGGLVQPGGSLKLSCAASGFTFNKYAMNWVRQAPGKGLEWVARIRSKYNNYATYYADSVKDRFTISRDDSKNTAYLQMNNLKTEDTAVYYCVRHGNFGNSYISYWAYWGQGTLVTVSSGGGGSGGGGSGGGGSQTVVTQEPSLTVSPGGTVTLTCGSSTGAVTSGNYPNWVQQKPGQAPRGLIGGTKFLAPGTPARFSGSLLGGKAALTLSGVQPEDEAEYYCVLWYSNRWVFGGGTKLTVL

SEQ ID NO: 580 - protein, 1235 aa, Artificial Sequence
  Synthetic Polypeptide
QVQLVQSGAEVKKPGASVKVSCKASGYTFTSYWMHWVRQAPGQCLEWIGYITPSTGYTEYNQKFKGRVTMTRDKSTSTVYMELSSLTSEDTAVYYCARVHDYDRAMEYWGQGTTVTVSSGGGGSGGGGSGGGGSDIQMTQSPSSLSASVGDRVTITCKASQDINKYIAWYQQKPGKGPKLLIYYTSTLQPGVPSRFSGSGSGTDFTFTISSLQPEDIATYYCLQYASYPFTFGCGTRLEIKSGGGGSQVQLVQSGAEVKKPGASVKVSCKASGYTFTSYGISWVRQAPGQCLEWMGWISAYSGNAIYAQKLQGRVTMTRDTSTSTAYMELRSLRSDDTAVYYCARDPDYYGSGSYSDYWGQGTLVTVSSGGGGSGGGGSGGGGSEIVLTQSPATLSVSPGERATLSCRASQSVSSNLAWYQQKPGQAPRLLIYGASSRATGIPARFSGSGSGTEFTLTISSLQSEDFAVYYCQQYHSWPLLTFGCGTKVEIKSGGGGSEVQLVESGGGLVQPGGSLKLSCAASGFTFNKYAMNWVRQAPGKGLEWVARIRSKYNNYATYYADSVKDRFTISRDDSKNTAYLQMNNLKTEDTAVYYCVRHGNFGNSYISYWAYWGQGTLVTVSSGGGGSGGGGSGGGGSQTVVTQEPSLTVSPGGTVTLTCGSSTGAVTSGNYPNWVQQKPGQAPRGLIGGTKFLAPGTPARFSGSLLGGKAALTLSGVQPEDEAEYYCVLWYSNRWVFGGGTKLTVLGGGGDKTHTCPPCPAPELLGGPSVFLFPPKPKDTLMISRTPEVTCVVVDVSHEDPEVKFNWYVDGVEVHNAKTKPCEEQYGSTYRCVSVLTVLHQDWLNGKEYKCKVSNKALPAPIEKTISKAKGQPREPQVYTLPPSREEMTKNQVSLTCLVKGFYPSDIAVEWESNGQPENNYKTTPPVLDSDGSFFLYSKLTVDKSRWQQGNVFSCSVMHEALHNHYTQKSLSLSPGKGGGGSGGGGSGGGGSGGGGSGGGGSGGGGSDKTHTCPPCPAPELLGGPSVFLFPPKPKDTLMISRTPEVTCVVVDVSHEDPEVKFNWYVDGVEVHNAKTKPCEEQYGSTYRCVSVLTVLHQDWLNGKEYKCKVSNKALPAPIEKTISKAKGQPREPQVYTLPPSREEMTKNQVSLTCLVKGFYPSDIAVEWESNGQPENNYKTTPPVLDSDGSFFLYSKLTVDKSRWQQGNVFSCSVMHEALHNHYTQKSLSLSPGK

SEQ ID NO: 581 - protein, 490 aa, Artificial Sequence
  Synthetic Polypeptide
QVQLQESGPGLVKPSETLSLTCTVSGGSISSFYWSWIRQPPGKCLEWIGRISSSGDVDYNPSLKSRVTISVDTSKNQFSLKLSSVTAADTAVYYCAREGGFYYWGQGTLVTVSSGGGGSGGGGSGGGGSEIVLTQSPGTLSLSPGERATLSCRASQSVSSSYLAWYQQKPGQAPRLLIYGASSRATGIPDRFSGSGSGTDFTLTISRLEPEDFAVYYCQQYGSSPITFGCGTKLEIKSGGGGSQVQLQQWGAGLLKPSETLSLTCAVYGGSFSGYYWSWIRQPPGKCLEWIGEINHRGSTNYNPSLKSRVTISGDTSKNQFSLKLSSVNAADTAVYYCARGYSSSWYTGYVFDYWGQGTLVTVSSGGGGSGGGGSGGGGSQSALTQPASVSGSPGQSITISCTGTSSDVFGYDYVSWYQQHPGKAPKLMIYDVSNRPSGVSNRFSGSKSGNAASLTISGLQAEDEADYYCSSYKSSSTVVFGCGTKLTVL

SEQ ID NO: 582 - protein, 745 aa, Artificial Sequence
  Synthetic Polypeptide
QVQLQESGPGLVKPSETLSLTCTVSGGSISSFYWSWIRQPPGKCLEWIGRISSSGDVDYNPSLKSRVTISVDTSKNQFSLKLSSVTAADTAVYYCAREGGFYYWGQGTLVTVSSGGGGSGGGGSGGGGSEIVLTQSPGTLSLSPGERATLSCRASQSVSSSYLAWYQQKPGQAPRLLIYGASSRATGIPDRFSGSGSGTDFTLTISRLEPEDFAVYYCQQYGSSPITFGCGTKLEIKSGGGGSQVQLQQWGAGLLKPSETLSLTCAVYGGSFSGYYWSWIRQPPGKCLEWIGEINHRGSTNYNPSLKSRVTISGDTSKNQFSLKLSSVNAADTAVYYCARGYSSSWYTGYVFDYWGQGTLVTVSSGGGGSGGGGSGGGGSQSALTQPASVSGSPGQSITISCTGTSSDVFGYDYVSWYQQHPGKAPKLMIYDVSNRPSGVSNRFSGSKSGNAASLTISGLQAEDEADYYCSSYKSSSTVVFGCGTKLTVLSGGGGSEVQLVESGGGLVQPGGSLKLSCAASGFTFNKYAMNWVRQAPGKGLEWVARIRSKYNNYATYYADSVKDRFTISRDDSKNTAYLQMNNLKTEDTAVYYCVRHGNFGNSYISYWAYWGQGTLVTVSSGGGGSGGGGSGGGGSQTVVTQEPSLTVSPGGTVTLTCGSSTGAVTSGNYPNWVQQKPGQAPRGLIGGTKFLAPGTPARFSGSLLGGKAALTLSGVQPEDEAEYYCVLWYSNRWVFGGGTKLTVL

SEQ ID NO: 583 - protein, 1233 aa, Artificial Sequence
  Synthetic Polypeptide
QVQLQESGPGLVKPSETLSLTCTVSGGSISSFYWSWIRQPPGKCLEWIGRISSSGDVDYNPSLKSRVTISVDTSKNQFSLKLSSVTAADTAVYYCAREGGFYYWGQGTLVTVSSGGGGSGGGGSGGGGSEIVLTQSPGTLSLSPGERATLSCRASQSVSSSYLAWYQQKPGQAPRLLIYGASSRATGIPDRFSGSGSGTDFTLTISRLEPEDFAVYYCQQYGSSPITFGCGTKLEIKSGGGGSQVQLQQWGAGLLKPSETLSLTCAVYGGSFSGYYWSWIRQPPGKCLEWIGEINHRGSTNYNPSLKSRVTISGDTSKNQFSLKLSSVNAADTAVYYCARGYSSSWYTGYVFDYWGQGTLVTVSSGGGGSGGGGSGGGGSQSALTQPASVSGSPGQSITISCTGTSSDVFGYDYVSWYQQHPGKAPKLMIYDVSNRPSGVSNRFSGSKSGNAASLTISGLQAEDEADYYCSSYKSSSTVVFGCGTKLTVLSGGGGSEVQLVESGGGLVQPGGSLKLSCAASGFTFNKYAMNWVRQAPGKGLEWVARIRSKYNNYATYYADSVKDRFTISRDDSKNTAYLQMNNLKTEDTAVYYCVRHGNFGNSYISYWAYWGQGTLVTVSSGGGGSGGGGSGGGGSQTVVTQEPSLTVSPGGTVTLTCGSSTGAVTSGNYPNWVQQKPGQAPRGLIGGTKFLAPGTPARFSGSLLGGKAALTLSGVQPEDEAEYYCVLWYSNRWVFGGGTKLTVLGGGGDKTHTCPPCPAPELLGGPSVFLFPPKPKDTLMISRTPEVTCVVVDVSHEDPEVKFNWYVDGVEVHNAKTKPCEEQYGSTYRCVSVLTVLHQDWLNGKEYKCKVSNKALPAPIEKTISKAKGQPREPQVYTLPPSREEMTKNQVSLTCLVKGFYPSDIAVEWESNGQPENNYKTTPPVLDSDGSFFLYSKLTVDKSRWQQGNVFSCSVMHEALHNHYTQKSLSLSPGKGGGGSGGGGSGGGGSGGGGSGGGGSGGGGSDKTHTCPPCPAPELLGGPSVFLFPPKPKDTLMISRTPEVTCVVVDVSHEDPEVKFNWYVDGVEVHNAKTKPCEEQYGSTYRCVSVLTVLHQDWLNGKEYKCKVSNKALPAPIEKTISKAKGQPREPQVYTLPPSREEMTKNQVSLTCLVKGFYPSDIAVEWESNGQPENNYKTTPPVLDSDGSFFLYSKLTVDKSRWQQGNVFSCSVMHEALHNHYTQKSLSLSPGK

SEQ ID NO: 584 - protein, 727 aa, Artificial Sequence
  Synthetic Polypeptide
QVQLVQSGAEVKKPGASVKVSCKASGYTFTSYWMHWVRQAPGQGLEWIGYITPSTGYTEYNQKFKGRVTMTRDKSTSTVYMELSSLTSEDTAVYYCARVHDYDRAMEYWGQGTTVTVSSASTKGPSVFPLAPSSKSTSGGTAALGCLVKDYFPEPVTVSWNSGALTSGVHTFPAVLQSSGLYSLSSVVTVPSSSLGTQTYICNVNHKPSNTKVDKKVEPKSCGGGGSGGGGSGGGGSGGGGSGGGGSGGGGSGGGGSGGGGSDIQMTQSPSSLSASVGDRVTITCKASQDINKYIAWYQQKPGKGPKLLIYYTSTLQPGVPSRFSGSGSGTDFTFTISSLQPEDIATYYCLQYASYPFTFGQGTRLEIKRTVAAPSVFIFPPSDEQLKSGTASVVCLLNNFYPREAKVQWKVDNALQSGNSQESVTEQDSKDSTYSLSSTLTLSKADYEKHKVYACEVTHQGLSSPVTKSFNRGECSGGGGSQVQLVQSGAEVKKPGASVKVSCKASGYTFTSYGISWVRQAPGQCLEWMGWISAYSGNAIYAQKLQGRVTMTRDTSTSTAYMELRSLRSDDTAVYYCARDPDYYGSGSYSDYWGQGTLVTVSSGGGGSGGGGSGGGGSEIVLTQSPATLSVSPGERATLSCRASQSVSSNLAWYQQKPGQAPRLLIYGASSRATGIPARFSGSGSGTEFTLTISSLQSEDFAVYYCQQYHSWPLLTFGCGTKVEIK

SEQ ID NO: 585 - protein, 982 aa, Artificial Sequence
  Synthetic Polypeptide
QVQLVQSGAEVKKPGASVKVSCKASGYTFTSYWMHWVRQAPGQGLEWIGYITPSTGYTEYNQKFKGRVTMTRDKSTSTVYMELSSLTSEDTAVYYCARVHDYDRAMEYWGQGTTVTVSSASTKGPSVFPLAPSSKSTSGGTAALGCLVKDYFPEPVTVSWNSGALTSGVHTFPAVLQSSGLYSLSSVVTVPSSSLGTQTYICNVNHKPSNTKVDKKVEPKSCGGGGSGGGGSGGGGSGGGGSGGGGSGGGGSGGGGSGGGGSDIQMTQSPSSLSASVGDRVTITCKASQDINKYIAWYQQKPGKGPKLLIYYTSTLQPGVPSRFSGSGSGTDFTFTISSLQPEDIATYYCLQYASYPFTFGQGTRLEIKRTVAAPSVFIFPPSDEQLKSGTASVVCLLNNFYPREAKVQWKVDNALQSGNSQESVTEQDSKDSTYSLSSTLTLSKADYEKHKVYACEVTHQGLSSPVTKSFNRGECSGGGGSQVQLVQSGAEVKKPGASVKVSCKASGYTFTSYGISWVRQAPGQCLEWMGWISAYSGNAIYAQKLQGRVTMTRDTSTSTAYMELRSLRSDDTAVYYCARDPDYYGSGSYSDYWGQGTLVTVSSGGGGSGGGGSGGGGSEIVLTQSPATLSVSPGERATLSCRASQSVSSNLAWYQQKPGQAPRLLIYGASSRATGIPARFSGSGSGTEFTLTISSLQSEDFAVYYCQQYHSWPLLTFGCGTKVEIKSGGGGSEVQLVESGGGLVQPGGSLKLSCAASGFTFNKYAMNWVRQAPGKGLEWVARIRSKYNNYATYYADSVKDRFTISRDDSKNTAYLQMNNLKTEDTAVYYCVRHGNFGNSYISYWAYWGQGTLVTVSSGGGGSGGGGSGGGGSQTVVTQEPSLTVSPGGTVTLTCGSSTGAVTSGNYPNWVQQKPGQAPRGLIGGTKFLAPGTPARFSGSLLGGKAALTLSGVQPEDEAEYYCVLWYSNRWVFGGGTKLTVL

SEQ ID NO: 586 - protein, 1470 aa, Artificial Sequence
  Synthetic Polypeptide
QVQLVQSGAEVKKPGASVKVSCKASGYTFTSYWMHWVRQAPGQGLEWIGYITPSTGYTEYNQKFKGRVTMTRDKSTSTVYMELSSLTSEDTAVYYCARVHDYDRAMEYWGQGTTVTVSSASTKGPSVFPLAPSSKSTSGGTAALGCLVKDYFPEPVTVSWNSGALTSGVHTFPAVLQSSGLYSLSSVVTVPSSSLGTQTYICNVNHKPSNTKVDKKVEPKSCGGGGSGGGGSGGGGSGGGGSGGGGSGGGGSGGGGSGGGGSDIQMTQSPSSLSASVGDRVTITCKASQDINKYIAWYQQKPGKGPKLLIYYTSTLQPGVPSRFSGSGSGTDFTFTISSLQPEDIATYYCLQYASYPFTFGQGTRLEIKRTVAAPSVFIFPPSDEQLKSGTASVVCLLNNFYPREAKVQWKVDNALQSGNSQESVTEQDSKDSTYSLSSTLTLSKADYEKHKVYACEVTHQGLSSPVTKSFNRGECSGGGGSQVQLVQSGAEVKKPGASVKVSCKASGYTFTSYGISWVRQAPGQCLEWMGWISAYSGNAIYAQKLQGRVTMTRDTSTSTAYMELRSLRSDDTAVYYCARDPDYYGSGSYSDYWGQGTLVTVSSGGGGSGGGGSGGGGSEIVLTQSPATLSVSPGERATLSCRASQSVSSNLAWYQQKPGQAPRLLIYGASSRATGIPARFSGSGSGTEFTLTISSLQSEDFAVYYCQQYHSWPLLTFGCGTKVEIKSGGGGSEVQLVESGGGLVQPGGSLKLSCAASGFTFNKYAMNWVRQAPGKGLEWVARIRSKYNNYATYYADSVKDRFTISRDDSKNTAYLQMNNLKTEDTAVYYCVRHGNFGNSYISYWAYWGQGTLVTVSSGGGGSGGGGSGGGGSQTVVTQEPSLTVSPGGTVTLTCGSSTGAVTSGNYPNWVQQKPGQAPRGLIGGTKFLAPGTPARFSGSLLGGKAALTLSGVQPEDEAEYYCVLWYSNRWVFGGGTKLTVLGGGGDKTHTCPPCPAPELLGGPSVFLFPPKPKDTLMISRTPEVTCVVVDVSHEDPEVKFNWYVDGVEVHNAKTKPCEEQYGSTYRCVSVLTVLHQDWLNGKEYKCKVSNKALPAPIEKTISKAKGQPREPQVYTLPPSREEMTKNQVSLTCLVKGFYPSDIAVEWESNGQPENNYKTTPPVLDSDGSFFLYSKLTVDKSRWQQGNVFSCSVMHEALHNHYTQKSLSLSPGKGGGGSGGGGSGGGGSGGGGSGGGGSGGGGSDKTHTCPPCPAPELLGGPSVFLFPPKPKDTLMISRTPEVTCVVVDVSHEDPEVKFNWYVDGVEVHNAKTKPCEEQYGSTYRCVSVLTVLHQDWLNGKEYKCKVSNKALPAPIEKTISKAKGQPREPQVYTLPPSREEMTKNQVSLTCLVKGFYPSDIAVEWESNGQPENNYKTTPPVLDSDGSFFLYSKLTVDKSRWQQGNVFSCSVMHEALHNHYTQKSLSLSPGK

SEQ ID NO: 587 - protein, 959 aa, Artificial Sequence
  Synthetic Polypeptide
QVQLQESGPGLVKPSETLSLTCTVSGGSISSFYWSWIRQPPGKGLEWIGRISSSGDVDYNPSLKSRVTISVDTSKNQFSLKLSSVTAADTAVYYCAREGGFYYWGQGTLVTVSSASTKGPSVFPLAPSSKSTSGGTAALGCLVKDYFPEPVTVSWNSGALTSGVHTFPAVLQSSGLYSLSSVVTVPSSSLGTQTYICNVNHKPSNTKVDKKVEPKSCGGGGSGGGGSGGGGSGGGGSGGGGSGGGGSGGGGSGGGGSEIVLTQSPGTLSLSPGERATLSCRASQSVSSSYLAWYQQKPGQAPRLLIYGASSRATGIPDRFSGSGSGTDFTLTISRLEPEDFAVYYCQQYGSSPITFGQGTKLEIKRTVAAPSVFIFPPSDEQLKSGTASVVCLLNNFYPREAKVQWKVDNALQSGNSQESVTEQDSKDSTYSLSSTLTLSKADYEKHKVYACEVTHQGLSSPVTKSFNRGECSGGGGSQVQLQQWGAGLLKPSETLSLTCAVYGGSFSGYYWSWIRQPPGKGLEWIGEINHRGSTNYNPSLKSRVTISGDTSKNQFSLKLSSVNAADTAVYYCARGYSSSWYTGYVFDYWGQGTLVTVSSASTKGPSVFPLAPSSKSTSGGTAALGCLVKDYFPEPVTVSWNSGALTSGVHTFPAVLQSSGLYSLSSVVTVPSSSLGTQTYICNVNHKPSNTKVDKKVEPKSCGGGGSGGGGSGGGGSGGGGSGGGGSGGGGSGGGGSGGGGSQSALTQPASVSGSPGQSITISCTGTSSDVFGYDYVSWYQQHPGKAPKLMIYDVSNRPSGVSNRFSGSKSGNAASLTISGLQAEDEADYYCSSYKSSSTVVFGGGTKLTVLGQPKAAPSVTLFPPSSEELQANKATLVCLISDFYPGAVTVAWKADSSPVKAGVETTTPSKQSNNKYAASSYLSLTPEQWKSHRSYSCQVTHEGSTVEKTVAPTECS

SEQ ID NO: 588 - protein, 1214 aa, Artificial Sequence
  Synthetic Polypeptide
QVQLQESGPGLVKPSETLSLTCTVSGGSISSFYWSWIRQPPGKGLEWIGRISSSGDVDYNPSLKSRVTISVDTSKNQFSLKLSSVTAADTAVYYCAREGGFYYWGQGTLVTVSSASTKGPSVFPLAPSSKSTSGGTAALGCLVKDYFPEPVTVSWNSGALTSGVHTFPAVLQSSGLYSLSSVVTVPSSSLGTQTYICNVNHKPSNTKVDKKVEPKSCGGGGSGGGGSGGGGSGGGGSGGGGSGGGGSGGGGSGGGGSEIVLTQSPGTLSLSPGERATLSCRASQSVSSSYLAWYQQKPGQAPRLLIYGASSRATGIPDRFSGSGSGTDFTLTISRLEPEDFAVYYCQQYGSSPITFGQGTKLEIKRTVAAPSVFIFPPSDEQLKSGTASVVCLLNNFYPREAKVQWKVDNALQSGNSQESVTEQDSKDSTYSLSSTLTLSKADYEKHKVYACEVTHQGLSSPVTKSFNRGECSGGGGSQVQLQQWGAGLLKPSETLSLTCAVYGGSFSGYYWSWIRQPPGKGLEWIGEINHRGSTNYNPSLKSRVTISGDTSKNQFSLKLSSVNAADTAVYYCARGYSSSWYTGYVFDYWGQGTLVTVSSASTKGPSVFPLAPSSKSTSGGTAALGCLVKDYFPEPVTVSWNSGALTSGVHTFPAVLQSSGLYSLSSVVTVPSSSLGTQTYICNVNHKPSNTKVDKKVEPKSCGGGGSGGGGSGGGGSGGGGSGGGGSGGGGSGGGGSGGGGSQSALTQPASVSGSPGQSITISCTGTSSDVFGYDYVSWYQQHPGKAPKLMIYDVSNRPSGVSNRFSGSKSGNAASLTISGLQAEDEADYYCSSYKSSSTVVFGGGTKLTVLGQPKAAPSVTLFPPSSEELQANKATLVCLISDFYPGAVTVAWKADSSPVKAGVETTTPSKQSNNKYAASSYLSLTPEQWKSHRSYSCQVTHEGSTVEKTVAPTECSSGGGGSEVQLVESGGGLVQPGGSLKLSCAASGFTFNKYAMNWVRQAPGKGLEWVARIRSKYNNYATYYADSVKDRFTISRDDSKNTAYLQMNNLKTEDTAVYYCVRHGNFGNSYISYWAYWGQGTLVTVSSGGGGSGGGGSGGGGSQTVVTQEPSLTVSPGGTVTLTCGSSTGAVTSGNYPNWVQQKPGQAPRGLIGGTKFLAPGTPARFSGSLLGGKAALTLSGVQPEDEAEYYCVLWYSNRWVFGGGTKLTVL

SEQ ID NO: 589 - protein, 1702 aa, Artificial Sequence
  Synthetic Polypeptide
QVQLQESGPGLVKPSETLSLTCTVSGGSISSFYWSWIRQPPGKGLEWIGRISSSGDVDYNPSLKSRVTISVDTSKNQFSLKLSSVTAADTAVYYCAREGGFYYWGQGTLVTVSSASTKGPSVFPLAPSSKSTSGGTAALGCLVKDYFPEPVTVSWNSGALTSGVHTFPAVLQSSGLYSLSSVVTVPSSSLGTQTYICNVNHKPSNTKVDKKVEPKSCGGGGSGGGGSGGGGSGGGGSGGGGSGGGGSGGGGSGGGGSEIVLTQSPGTLSLSPGERATLSCRASQSVSSSYLAWYQQKPGQAPRLLIYGASSRATGIPDRFSGSGSGTDFTLTISRLEPEDFAVYYCQQYGSSPITFGQGTKLEIKRTVAAPSVFIFPPSDEQLKSGTASVVCLLNNFYPREAKVQWKVDNALQSGNSQESVTEQDSKDSTYSLSSTLTLSKADYEKHKVYACEVTHQGLSSPVTKSFNRGECSGGGGSQVQLQQWGAGLLKPSETLSLTCAVYGGSFSGYYWSWIRQPPGKGLEWIGEINHRGSTNYNPSLKSRVTISGDTSKNQFSLKLSSVNAADTAVYYCARGYSSSWYTGYVFDYWGQGTLVTVSSASTKGPSVFPLAPSSKSTSGGTAALGCLVKDYFPEPVTVSWNSGALTSGVHTFPAVLQSSGLYSLSSVVTVPSSSLGTQTYICNVNHKPSNTKVDKKVEPKSCGGGGSGGGGSGGGGSGGGGSGGGGSGGGGSGGGGSGGGGSQSALTQPASVSGSPGQSITISCTGTSSDVFGYDYVSWYQQHPGKAPKLMIYDVSNRPSGVSNRFSGSKSGNAASLTISGLQAEDEADYYCSSYKSSSTVVFGGGTKLTVLGQPKAAPSVTLFPPSSEELQANKATLVCLISDFYPGAVTVAWKADSSPVKAGVETTTPSKQSNNKYAASSYLSLTPEQWKSHRSYSCQVTHEGSTVEKTVAPTECSSGGGGSEVQLVESGGGLVQPGGSLKLSCAASGFTFNKYAMNWVRQAPGKGLEWVARIRSKYNNYATYYADSVKDRFTISRDDSKNTAYLQMNNLKTEDTAVYYCVRHGNFGNSYISYWAYWGQGTLVTVSSGGGGSGGGGSGGGGSQTVVTQEPSLTVSPGGTVTLTCGSSTGAVTSGNYPNWVQQKPGQAPRGLIGGTKFLAPGTPARFSGSLLGGKAALTLSGVQPEDEAEYYCVLWYSNRWVFGGGTKLTVLGGGGDKTHTCPPCPAPELLGGPSVFLFPPKPKDTLMISRTPEVTCVVVDVSHEDPEVKFNWYVDGVEVHNAKTKPCEEQYGSTYRCVSVLTVLHQDWLNGKEYKCKVSNKALPAPIEKTISKAKGQPREPQVYTLPPSREEMTKNQVSLTCLVKGFYPSDIAVEWESNGQPENNYKTTPPVLDSDGSFFLYSKLTVDKSRWQQGNVFSCSVMHEALHNHYTQKSLSLSPGKGGGGSGGGGSGGGGSGGGGSGGGGSGGGGSDKTHTCPPCPAPELLGGPSVFLFPPKPKDTLMISRTPEVTCVVVDVSHEDPEVKFNWYVDGVEVHNAKTKPCEEQYGSTYRCVSVLTVLHQDWLNGKEYKCKVSNKALPAPIEKTISKAKGQPREPQVYTLPPSREEMTKNQVSLTCLVKGFYPSDIAVEWESNGQPENNYKTTPPVLDSDGSFFLYSKLTVDKSRWQQGNVFSCSVMHEALHNHYTQKSLSLSPGK

SEQ ID NO: 590 - DNA, 2925 bp, Artificial Sequence
  Synthetic Polynucleotide
gaggtgcagctggtggaatctggcggaggacttgtgaagcctggcggctctctgagactgtcttgtgccgcttctggcttcaccttcagcaacgccagaatgggctgggtccgacaggctcctggaaagtgtctggaatgggtcggacggatcaagtccaagaccgaaggcggcaccagagactacgccgctcctgtgaagggcagattcaccatctctcgggacgactccaagaacaccctgtacctgcagatgaactccctgaaaaccgaggacaccgccgtgtactactgcacctcttactctggcgtgtggggccagggcacaatggtcacagtttctagcggcggaggtggacaaggtggtggcggacaaggcggcggtggtcaagagattgtgatgacccagtctcctgacagcctggccgtgtctctgggagagagagccaccatcaactgcaagtccagccagtccgtgctgtactcctccaacaacaagaactacctggcctggtatcaccagaagccaggccagtctccaaagctgctgatctcctgggcctccaccagagaaagcggcgtgcccgatagattctccggctctggctctggcaccgacttcaccctgaccatcaattccctgcaggccgaggatgtggctgtgtactattgccagcagtactacagcatccccatcaccttcggctgcggcaccaaggtggaaatcaagtccggaggtggagggcaggaagtgcagctggttgaatctggcggcggattggttcagcctggcggatctctgaagctgtcttgtgccgcctctggcttcaccttcaacaaatacgccatcaactgggtccgacaggcccctggcaaaggactggaatgggtcgcccggatcagatccaagtacaacaactacgctacctactacgccgacgccgtgaaggaccggttcaccatctccagagatgactccaagaacaccgtgtacctgcagatgaacaacctcaagaccgaggacaccgccgtgtactactgtgccagagccggcaacttcggctcctcctacatcagctactgggcctattggggccagggcacactggtcacagttagttcaggtggcggtggacagggcggcggaggtcagggtggcggaggccagcaaacagtggtcacccaagagcctagcctgaccgtttctcctggcggcaccgtgaccatcacctgtggatcttctaccggcgctgtgacctccggcaactaccctaattgggtgcagaagaagcccggccaggctcctagaggactgatcggaggcaccaagtttctggctcccggcactcctgccagattctccggttctctgtctggcggaaaggccgctctgacattgtctggcgtgcagcctgaggatgaggctgagtactattgcgtgctgtggtactccaacagatgggtgttcggctccggcaccaagctgacagttctcggcggaggtggatgccctccttgtcctgctcctgaattgctcggcggaccctccgtgttcctgtttcctccaaagcctaaggacaccctgatgatctctcgtacgcctgaagtgacctgcgtggtggtggatgtgtcccacgaggaacccgaagtgaagttcaattggtacgtggacggcgtggaagtgcacaacgccaagacaaagccctgcgaggaacagtacggctccacctacagatgcgtgtccgtgctgacagtgctgcaccaggattggctgaacggcaaagagtacaagtgcaaggtgtccaacaaggccctgcctgctcctatcgaaaagaccatctccaaggccaagggccagcctagagagccccaggtttacaccctgcctccaagcagagaagagatgaccaagaaccaggtgtccctgacctgcctggtcaagggcttctacccttccgatatcgccgtggaatgggagagcaatggacagcccgagaacaactacaagaccacacctcctgtgctggactccgacggctcattcttcctgtactccaagctgaccgtggacaagtccagatggcagcagggcaacgtgttctcctgctccgtgatgcacgaggccctgcacaatcactacacccagaagtccctgtctctgtcccctggaggcggaggacaaggcggaggtggtcaaggtggtggtggccaaggcggaggcggacaaggcggcggaggacaaggtggcggtggacagtgtcctccatgtccagcacctgagcttctcggaggcccttctgtgtttctgttcccacctaagccaaaggatacactcatgatcagccgcacacctgaagtcacatgtgtcgtcgtggatgtctctcatgaagaaccagaagtcaagtttaattggtatgtcgatggcgtcgaggtccacaatgctaagaccaagccttgtgaagaacaatatggcagcacctatcgctgtgtgtctgtcctgaccgtcctgcatcaagactggctcaatgggaaagaatacaaatgcaaagtctctaacaaagctctgcccgcaccaatcgagaaaaccatcagcaaggctaaaggacagcctcgcgagcctcaagtgtataccctgccaccttctcgcgaggaaatgacaaaaaatcaagtctccctcacctgtctcgtgaagggattctatcccagcgacattgccgtcgagtgggagtctaatggccagcctgaaaacaattataagacaaccccacctgtcctggacagcgacggctcattttttctctactctaaactcaccgtggataagagccggtggcaacagggaaatgtgttcagctgtagcgtgatgcatgaagctctccacaaccattatacacagaagagtctgagcctgtctcctggcaaatga

SEQ ID NO: 591 - DNA, 2925 bp, Artificial Sequence
  Synthetic Polynucleotide
gaggtgcagctggtggaatctggcggaggacttgtgaagcctggcggctctctgagactgtcttgtgccgcttctggcttcaccttcagcaacgccagaatgggctgggtccgacaggctcctggaaagtgtctggaatgggtcggacggatcaagtccaagaccgaaggcggcaccagagactacgccgctcctgtgaagggcagattcaccatctctcgggacgactccaagaacaccctgtacctgcagatgaactccctgaaaaccgaggacaccgccgtgtactactgcacctcttactctggcgtgtggggccagggcacaatggtcacagtttctagcggcggaggtggacaaggtggtggcggacaaggcggcggtggtcaagagattgtgatgacccagtctcctgacagcctggccgtgtctctgggagagagagccaccatcaactgcaagtccagccagtccgtgctgtactcctccaacaacaagaactacctggcctggtatcaccagaagccaggccagtctccaaagctgctgatctcctgggcctccaccagagaaagcggcgtgcccgatagattctccggctctggctctggcaccgacttcaccctgaccatcaattccctgcaggccgaggatgtggctgtgtactattgccagcagtactacagcatccccatcaccttcggctgcggcaccaaggtggaaatcaagtccggaggtggagggcaggaagtgcagctggttgaatctggcggcggattggttcagcctggcggatctctgaagctgtcttgtgccgcctctggcttcaccttcaacaaatacgccatcaactgggtccgacaggcccctggcaaaggactggaatgggtcgcccggatcagatccaagtacaacaactacgctacctactacgccgacgccgtgaaggaccggttcaccatctccagagatgactccaagaacaccgtgtacctgcagatgaacaacctcaagaccgaggacaccgccgtgtactactgtgccagagccggcaacttcggctcctcctacatcagctactgggcctattggggccagggcacactggtcacagttagttcaggtggcggtggacagggcggcggaggtcagggtggcggaggccagcaaacagtggtcacccaagagcctagcctgaccgtttctcctggcggcaccgtgaccatcacctgtggatcttctaccggcgctgtgacctccggcaactaccctaattgggtgcagaagaagcccggccaggctcctagaggactgatcggaggcaccaagtttctggctcccggcactcctgccagattctccggttctctgtctggcggaaaggccgctctgacattgtctggcgtgcagcctgaggatgaggctgagtactattgcgtgctgtggtactccaacagatgggtgttcggctccggcaccaagctgacagttctcggcggaggtggatgccctccttgtcctgctcctgaattgctcggcggaccctccgtgttcctgtttcctccaaagcctaaggacaccctgtacatcacccgcgagcctgaagtgacctgcgtggtggtggatgtgtcccacgaggaacccgaagtgaagttcaattggtacgtggacggcgtggaagtgcacaacgccaagacaaagccctgcgaggaacagtacggctccacctacagatgcgtgtccgtgctgacagtgctgcaccaggattggctgaacggcaaagagtacaagtgcaaggtgtccaacaaggccctgcctgctcctatcgaaaagaccatctccaaggccaagggccagcctagagagccccaggtttacaccctgcctccaagcagagaagagatgaccaagaaccaggtgtccctgacctgcctggtcaagggcttctacccttccgatatcgccgtggaatgggagagcaatggacagcccgagaacaactacaagaccacacctcctgtgctggactccgacggctcattcttcctgtactccaagctgaccgtggacaagtccagatggcagcagggcaacgtgttctcctgctccgtgatgcacgaggccctgcacaatcactacacccagaagtccctgtctctgtcccctggaggcggaggacaaggcggaggtggtcaaggtggtggtggccaaggcggaggcggacaaggcggcggaggacaaggtggcggtggacagtgtcctccatgtccagcacctgagcttctcggaggcccttctgtgtttctgttcccacctaagccaaaggatacactctacatcacccgcgagcctgaagtcacatgtgtcgtcgtggatgtctctcatgaagaaccagaagtcaagtttaattggtatgtcgatggcgtcgaggtccacaatgctaagaccaagccttgtgaagaacaatatggcagcacctatcgctgtgtgtctgtcctgaccgtcctgcatcaagactggctcaatgggaaagaatacaaatgcaaagtctctaacaaagctctgcccgcaccaatcgagaaaaccatcagcaaggctaaaggacagcctcgcgagcctcaagtgtataccctgccaccttctcgcgaggaaatgacaaaaaatcaagtctccctcacctgtctcgtgaagggattctatcccagcgacattgccgtcgagtgggagtctaatggccagcctgaaaacaattataagacaaccccacctgtcctggacagcgacggctcattttttctctactctaaactcaccgtggataagagccggtggcaacagggaaatgtgttcagctgtagcgtgatgcatgaagctctccacaaccattatacacagaagagtctgagcctgtctcctggcaaatga

SEQ ID NO: 592 - DNA, 3630 bp, Artificial Sequence
  Synthetic Polynucleotide
gaggtgcagctggtggaatctggcggaggacttgtgaagcctggcggctctctgagactgtcttgtgccgcttctggcttcaccttcagcaacgccagaatgggctgggtccgacaggctcctggaaaaggactggaatgggtcggacggatcaagtccaagaccgaaggcggcaccagagactacgccgctcctgtgaagggcagattcaccatctctcgggacgactccaagaacaccctgtacctgcagatgaactccctgaaaaccgaggacaccgccgtgtactactgcacctcttactctggcgtgtggggccagggcacaatggtcacagtttcttccgcctccaccaagggacccagcgttttccctctggctccatcctccaagtctacctctggcggaacagctgctctgggctgcctggtcaaggactactttcctgagcctgtgaccgtgtcctggaactctggcgctctgacatctggcgtgcacacctttccagctgtgctgcagtcctccggcctgtactctctgtcctctgtcgtgaccgtgccttccagctctctgggaacccagacctacatctgcaatgtgaaccacaagccttccaacaccaaggtggacaagaaggtggaacccaagtcttgtggcggaggcggacaaggtggtggtggtcaaggtggcggaggacaaggcggtggcggccaaggcggaggtggacaaggcggcggaggccaaggtggcggcggtcaaggcggcggtggtcaagaaattgtgatgacccagtctcctgacagcctggccgtgtctctgggagagagagccaccatcaactgcaagtccagccagtccgtgctgtactcctccaacaacaagaactacctggcctggtatcaccagaagccaggccagtctccaaagctgctgatctcctgggcctctaccagagaatccggcgtgcccgacagattttccggctctggctctggcaccgacttcaccctgaccatcaattccctgcaggccgaggatgtggctgtgtactattgccagcagtactacagcatccccatcaccttcggaggtggcaccaaggtcgagatcaagagaaccgtggccgctccttccgtgttcatcttcccaccttccgacgagcagctgaagtccggcacagcttctgtcgtgtgcctgctgaacaacttctaccctcgggaagccaaggtgcagtggaaagtggataacgccctgcagtccggcaactcccaagagtctgtgaccgagcaggactccaaggacagcacctacagcctgtcctccacactgaccctgtccaaggccgactacgagaagcacaaggtgtacgcctgcgaagtgacccatcagggcctgtctagccctgtgaccaagtctttcaaccggggcgagtgttccggaggtggagggcaggaagtgcagctggttgaatctggcggcggattggttcagcctggcggatctctgaagctgtcttgtgccgcctctggcttcaccttcaacaaatacgccatcaactgggtccgacaggcccctggcaaaggactggaatgggtcgcccggatcagatccaagtacaacaactacgctacctactacgccgacgccgtgaaggaccggttcaccatctccagagatgactccaagaacaccgtgtacctgcagatgaacaacctcaagaccgaggacaccgccgtgtactactgtgccagagccggcaacttcggctcctcctacatcagctactgggcctattggggccagggcacactggtcacagttagttcaggtggcggtggacagggcggcggaggtcagggtggcggaggccagcaaacagtggtcacccaagagcctagcctgaccgtttctcctggcggcaccgtgaccatcacctgtggatcttctaccggcgctgtgacctccggcaactaccctaattgggtgcagaagaagcccggccaggctcctagaggactgatcggaggcaccaagtttctggctcccggcactcctgccagattctccggttctctgtctggcggaaaggccgctctgacattgtctggcgtgcagcctgaggatgaggctgagtactattgcgtgctgtggtactccaacagatgggtgttcggctccggcaccaagctgacagttctcggcggaggtggatgccctccttgtcctgctcctgaattgctcggcggaccctccgtgttcctgtttcctccaaagcctaaggacaccctgatgatctctcgtacgcctgaagtgacctgcgtggtggtggatgtgtcccacgaggaacccgaagtgaagttcaattggtacgtggacggcgtggaagtgcacaacgccaagacaaagccctgcgaggaacagtacggctccacctacagatgcgtgtccgtgctgacagtgctgcaccaggattggctgaacggcaaagagtacaagtgcaaggtgtccaacaaggccctgcctgctcctatcgaaaagaccatctccaaggccaagggccagcctagagagccccaggtttacaccctgcctccaagcagagaagagatgaccaagaaccaggtgtccctgacctgcctggtcaagggcttctacccttccgatatcgccgtggaatgggagagcaatggacagcccgagaacaactacaagaccacacctcctgtgctggactccgacggctcattcttcctgtactccaagctgaccgtggacaagtccagatggcagcagggcaacgtgttctcctgctccgtgatgcacgaggccctgcacaatcactacacccagaagtccctgtctctgtcccctggaggcggaggacaaggcggaggtggtcaaggtggtggtggccaaggcggaggcggacaaggcggcggaggacaaggtggcggtggacagtgtcctccatgtccagcacctgagcttctcggaggcccttctgtgtttctgttcccacctaagccaaaggatacactcatgatcagccgcacacctgaagtcacatgtgtcgtcgtggatgtctctcatgaagaaccagaagtcaagtttaattggtatgtcgatggcgtcgaggtccacaatgctaagaccaagccttgtgaagaacaatatggcagcacctatcgctgtgtgtctgtcctgaccgtcctgcatcaagactggctcaatgggaaagaatacaaatgcaaagtctctaacaaagctctgcccgcaccaatcgagaaaaccatcagcaaggctaaaggacagcctcgcgagcctcaagtgtataccctgccaccttctcgcgaggaaatgacaaaaaatcaagtctccctcacctgtctcgtgaagggattctatcccagcgacattgccgtcgagtgggagtctaatggccagcctgaaaacaattataagacaaccccacctgtcctggacagcgacggctcattttttctctactctaaactcaccgtggataagagccggtggcaacagggaaatgtgttcagctgtagcgtgatgcatgaagctctccacaaccattatacacagaagagtctgagcctgtctcctggcaaatga

SEQ ID NO: 593 - DNA, 3630 bp, Artificial Sequence
  Synthetic Polynucleotide
gaggtgcagctggtggaatctggcggaggacttgtgaagcctggcggctctctgagactgtcttgtgccgcttctggcttcaccttcagcaacgccagaatgggctgggtccgacaggctcctggaaaaggactggaatgggtcggacggatcaagtccaagaccgaaggcggcaccagagactacgccgctcctgtgaagggcagattcaccatctctcgggacgactccaagaacaccctgtacctgcagatgaactccctgaaaaccgaggacaccgccgtgtactactgcacctcttactctggcgtgtggggccagggcacaatggtcacagtttcttccgcctccaccaagggacccagcgttttccctctggctccatcctccaagtctacctctggcggaacagctgctctgggctgcctggtcaaggactactttcctgagcctgtgaccgtgtcctggaactctggcgctctgacatctggcgtgcacacctttccagctgtgctgcagtcctccggcctgtactctctgtcctctgtcgtgaccgtgccttccagctctctgggaacccagacctacatctgcaatgtgaaccacaagccttccaacaccaaggtggacaagaaggtggaacccaagtcttgtggcggaggcggacaaggtggtggtggtcaaggtggcggaggacaaggcggtggcggccaaggcggaggtggacaaggcggcggaggccaaggtggcggcggtcaaggcggcggtggtcaagaaattgtgatgacccagtctcctgacagcctggccgtgtctctgggagagagagccaccatcaactgcaagtccagccagtccgtgctgtactcctccaacaacaagaactacctggcctggtatcaccagaagccaggccagtctccaaagctgctgatctcctgggcctctaccagagaatccggcgtgcccgacagattttccggctctggctctggcaccgacttcaccctgaccatcaattccctgcaggccgaggatgtggctgtgtactattgccagcagtactacagcatccccatcaccttcggaggtggcaccaaggtcgagatcaagagaaccgtggccgctccttccgtgttcatcttcccaccttccgacgagcagctgaagtccggcacagcttctgtcgtgtgcctgctgaacaacttctaccctcgggaagccaaggtgcagtggaaagtggataacgccctgcagtccggcaactcccaagagtctgtgaccgagcaggactccaaggacagcacctacagcctgtcctccacactgaccctgtccaaggccgactacgagaagcacaaggtgtacgcctgcgaagtgacccatcagggcctgtctagccctgtgaccaagtctttcaaccggggcgagtgttccggaggtggagggcaggaagtgcagctggttgaatctggcggcggattggttcagcctggcggatctctgaagctgtcttgtgccgcctctggcttcaccttcaacaaatacgccatcaactgggtccgacaggcccctggcaaaggactggaatgggtcgcccggatcagatccaagtacaacaactacgctacctactacgccgacgccgtgaaggaccggttcaccatctccagagatgactccaagaacaccgtgtacctgcagatgaacaacctcaagaccgaggacaccgccgtgtactactgtgccagagccggcaacttcggctcctcctacatcagctactgggcctattggggccagggcacactggtcacagttagttcaggtggcggtggacagggcggcggaggtcagggtggcggaggccagcaaacagtggtcacccaagagcctagcctgaccgtttctcctggcggcaccgtgaccatcacctgtggatcttctaccggcgctgtgacctccggcaactaccctaattgggtgcagaagaagcccggccaggctcctagaggactgatcggaggcaccaagtttctggctcccggcactcctgccagattctccggttctctgtctggcggaaaggccgctctgacattgtctggcgtgcagcctgaggatgaggctgagtactattgcgtgctgtggtactccaacagatgggtgttcggctccggcaccaagctgacagttctcggcggaggtggatgccctccttgtcctgctcctgaattgctcggcggaccctccgtgttcctgtttcctccaaagcctaaggacaccctgtacatcacccgcgagcctgaagtgacctgcgtggtggtggatgtgtcccacgaggaacccgaagtgaagttcaattggtacgtggacggcgtggaagtgcacaacgccaagacaaagccctgcgaggaacagtacggctccacctacagatgcgtgtccgtgctgacagtgctgcaccaggattggctgaacggcaaagagtacaagtgcaaggtgtccaacaaggccctgcctgctcctatcgaaaagaccatctccaaggccaagggccagcctagagagccccaggtttacaccctgcctccaagcagagaagagatgaccaagaaccaggtgtccctgacctgcctggtcaagggcttctacccttccgatatcgccgtggaatgggagagcaatggacagcccgagaacaactacaagaccacacctcctgtgctggactccgacggctcattcttcctgtactccaagctgaccgtggacaagtccagatggcagcagggcaacgtgttctcctgctccgtgatgcacgaggccctgcacaatcactacacccagaagtccctgtctctgtcccctggaggcggaggacaaggcggaggtggtcaaggtggtggtggccaaggcggaggcggacaaggcggcggaggacaaggtggcggtggacagtgtcctccatgtccagcacctgagcttctcggaggcccttctgtgtttctgttcccacctaagccaaaggatacactctacatcacccgcgagcctgaagtcacatgtgtcgtcgtggatgtctctcatgaagaaccagaagtcaagtttaattggtatgtcgatggcgtcgaggtccacaatgctaagaccaagccttgtgaagaacaatatggcagcacctatcgctgtgtgtctgtcctgaccgtcctgcatcaagactggctcaatgggaaagaatacaaatgcaaagtctctaacaaagctctgcccgcaccaatcgagaaaaccatcagcaaggctaaaggacagcctcgcgagcctcaagtgtataccctgccaccttctcgcgaggaaatgacaaaaaatcaagtctccctcacctgtctcgtgaagggattctatcccagcgacattgccgtcgagtgggagtctaatggccagcctgaaaacaattataagacaaccccacctgtcctggacagcgacggctcattttttctctactctaaactcaccgtggataagagccggtggcaacagggaaatgtgttcagctgtagcgtgatgcatgaagctctccacaaccattatacacagaagagtctgagcctgtctcctggcaaatga

SEQ ID NO: 594 - DNA, 65 bp, Artificial Sequence
  Synthetic Polynucleotide
atggacatgagagtgcctgcacagctgctgggcctgctgctgctgtggctgagaggcgccagatg

SEQ ID NO: 595 - protein, 5 aa, Artificial Sequence
  Synthetic Polypeptide
NNGMH

SEQ ID NO: 596 - protein, 17 aa, Artificial Sequence
  Synthetic Polypeptide
VISNDGSNKYYADSVKG

SEQ ID NO: 597 - protein, 19 aa, Artificial Sequence
  Synthetic Polypeptide
VYYGSGIYYKNRNYYGMDV

SEQ ID NO: 598 - protein, 11 aa, Artificial Sequence
  Synthetic Polypeptide
GGNNIGSQNVH

SEQ ID NO: 599 - protein, 7 aa, Artificial Sequence
  Synthetic Polypeptide
RDSNRPS

SEQ ID NO: 600 - protein, 9 aa, Artificial Sequence
  Synthetic Polypeptide
QVWDSSTVV

SEQ ID NO: 601 - protein, 5 aa, Artificial Sequence
  Synthetic Polypeptide
NYGMH

SEQ ID NO: 602 - protein, 17 aa, Artificial Sequence
  Synthetic Polypeptide
VISYDGSNKYYADSVKG

SEQ ID NO: 603 - protein, 19 aa, Artificial Sequence
  Synthetic Polypeptide
VYYGSGIYYKKRYYYGMDV

SEQ ID NO: 604 - protein, 11 aa, Artificial Sequence
  Synthetic Polypeptide
GGHNIGSKGVH

SEQ ID NO: 605 - protein, 7 aa, Artificial Sequence
  Synthetic Polypeptide
RNSNRPS

SEQ ID NO: 606 - protein, 9 aa, Artificial Sequence
  Synthetic Polypeptide
QVWDSSTVV

SEQ ID NO: 607 - protein, 5 aa, Artificial Sequence
  Synthetic Polypeptide
NYGMH

SEQ ID NO: 608 - protein, 17 aa, Artificial Sequence
  Synthetic Polypeptide
VISYDGSNKYYADSVKG

SEQ ID NO: 609 - protein, 19 aa, Artificial Sequence
  Synthetic Polypeptide
VYYGSGSYYKKRYYYGMDV

SEQ ID NO: 610 - protein, 11 aa, Artificial Sequence
  Synthetic Polypeptide
GGNNIGSQNVH

SEQ ID NO: 611 - protein, 7 aa, Artificial Sequence
  Synthetic Polypeptide
RDSNRPS

SEQ ID NO: 612 - protein, 9 aa, Artificial Sequence
  Synthetic Polypeptide
QVWDSSTVV

SEQ ID NO: 613 - protein, 5 aa, Artificial Sequence
  Synthetic Polypeptide
SSGMH

SEQ ID NO: 614 - protein, 17 aa, Artificial Sequence
  Synthetic Polypeptide
VISYDGTNKYYADSVKG

SEQ ID NO: 615 - protein, 19 aa, Artificial Sequence
  Synthetic Polypeptide
VYYGSGIYYKNRYYYGMDV

SEQ ID NO: 616 - protein, 11 aa, Artificial Sequence
  Synthetic Polypeptide
GGHNIGSKGVH

SEQ ID NO: 617 - protein, 7 aa, Artificial Sequence
  Synthetic Polypeptide
RNSNRPS

SEQ ID NO: 618 - protein, 9 aa, Artificial Sequence
  Synthetic Polypeptide
QVWDSSTVV

SEQ ID NO: 619 - protein, 5 aa, Artificial Sequence
  Synthetic Polypeptide
NYGMH

SEQ ID NO: 620 - protein, 17 aa, Artificial Sequence
  Synthetic Polypeptide
VISNDGSNKYYADSVKG

SEQ ID NO: 621 - protein, 19 aa, Artificial Sequence
  Synthetic Polypeptide
VYYGSGIYYKKRYYYGMDV

SEQ ID NO: 622 - protein, 11 aa, Artificial Sequence
  Synthetic Polypeptide
GGHNIGSQNVH

SEQ ID NO: 623 - protein, 7 aa, Artificial Sequence
  Synthetic Polypeptide
RDSNRPS

SEQ ID NO: 624 - protein, 9 aa, Artificial Sequence
  Synthetic Polypeptide
QVWDSSTVV

SEQ ID NO: 625 - protein, 5 aa, Artificial Sequence
  Synthetic Polypeptide
NYGMH

SEQ ID NO: 626 - protein, 17 aa, Artificial Sequence
  Synthetic Polypeptide
VISYDGSNKYYADSVKG

SEQ ID NO: 627 - protein, 19 aa, Artificial Sequence
  Synthetic Polypeptide
VYYGSGIYYKKRYYYGMDV

SEQ ID NO: 628 - protein, 11 aa, Artificial Sequence
  Synthetic Polypeptide
GGNNIGSKNVH

SEQ ID NO: 629 - protein, 7 aa, Artificial Sequence
  Synthetic Polypeptide
RNSNRPS

SEQ ID NO: 630 - protein, 9 aa, Artificial Sequence
  Synthetic Polypeptide
QVWDSSTVV

SEQ ID NO: 631 - protein, 5 aa, Artificial Sequence
  Synthetic Polypeptide
SYGMH

SEQ ID NO: 632 - protein, 17 aa, Artificial Sequence
  Synthetic Polypeptide
VISYDGSNKYYADSVKG

SEQ ID NO: 633 - protein, 19 aa, Artificial Sequence
  Synthetic Polypeptide
VYYGSGSYYKNRYYYGMDV

SEQ ID NO: 634 - protein, 11 aa, Artificial Sequence
  Synthetic Polypeptide
GGNNIGSKNVH

SEQ ID NO: 635 - protein, 7 aa, Artificial Sequence
  Synthetic Polypeptide
RDINRPS

SEQ ID NO: 636 - protein, 8 aa, Artificial Sequence
  Synthetic Polypeptide
QVWDSSVV

SEQ ID NO: 637 - protein, 5 aa, Artificial Sequence
  Synthetic Polypeptide
NYGMH

SEQ ID NO: 638 - protein, 17 aa, Artificial Sequence
  Synthetic Polypeptide
VISYDGSNKYYADSVKG

SEQ ID NO: 639 - protein, 19 aa, Artificial Sequence
  Synthetic Polypeptide
VYYGSGIYYKKRYYYGMDV

SEQ ID NO: 640 - protein, 11 aa, Artificial Sequence
  Synthetic Polypeptide
EGNNIGSKNVH

SEQ ID NO: 641 - protein, 7 aa, Artificial Sequence
  Synthetic Polypeptide
RNSNRPS

SEQ ID NO: 642 - protein, 9 aa, Artificial Sequence
  Synthetic Polypeptide
QAWDSSTVV

SEQ ID NO: 643 - protein, 5 aa, Artificial Sequence
  Synthetic Polypeptide
NNGMH

SEQ ID NO: 644 - protein, 17 aa, Artificial Sequence
  Synthetic Polypeptide
VISYDGSNKYYTDSVKG

SEQ ID NO: 645 - protein, 19 aa, Artificial Sequence
  Synthetic Polypeptide
VYYGSGIYYKKRYYYGMDV

SEQ ID NO: 646 - protein, 11 aa, Artificial Sequence
  Synthetic Polypeptide
GGNNIGSKNVH

SEQ ID NO: 647 - protein, 7 aa, Artificial Sequence
  Synthetic Polypeptide
RDSNRPS

SEQ ID NO: 648 - protein, 11 aa, Artificial Sequence
  Synthetic Polypeptide
QVWDSSSDHVV

SEQ ID NO: 649 - protein, 5 aa, Artificial Sequence
  Synthetic Polypeptide
NYGMH

SEQ ID NO: 650 - protein, 17 aa, Artificial Sequence
  Synthetic Polypeptide
VISYDGSNKYYADSVKG

SEQ ID NO: 651 - protein, 19 aa, Artificial Sequence
  Synthetic Polypeptide
VYYGSGIYYKKRYYYGMDV

SEQ ID NO: 652 - protein, 11 aa, Artificial Sequence
  Synthetic Polypeptide
GGNNIGSKNVH

SEQ ID NO: 653 - protein, 7 aa, Artificial Sequence
  Synthetic Polypeptide
RNSNRPS

SEQ ID NO: 654 - protein, 9 aa, Artificial Sequence
  Synthetic Polypeptide
QAWDSSNVV

SEQ ID NO: 655 - protein, 5 aa, Artificial Sequence
  Synthetic Polypeptide
RNGMH

SEQ ID NO: 656 - protein, 17 aa, Artificial Sequence
  Synthetic Polypeptide
VISNDGSNKYYADSVKG

SEQ ID NO: 657 - protein, 19 aa, Artificial Sequence
  Synthetic Polypeptide
VYYGSGIYYKNNYYYGMDV

SEQ ID NO: 658 - protein, 11 aa, Artificial Sequence
  Synthetic Polypeptide
GGNNIGSQNVH

SEQ ID NO: 659 - protein, 7 aa, Artificial Sequence
  Synthetic Polypeptide
RDSNRPS

SEQ ID NO: 660 - protein, 9 aa, Artificial Sequence
  Synthetic Polypeptide
QVWDSSTVV

SEQ ID NO: 661 - protein, 5 aa, Artificial Sequence
  Synthetic Polypeptide
RNGMH

SEQ ID NO: 662 - protein, 17 aa, Artificial Sequence
  Synthetic Polypeptide
VISNDGSNKYYADSVKG

SEQ ID NO: 663 - protein, 19 aa, Artificial Sequence
  Synthetic Polypeptide
VYYGSGIYYKNRYYYGMDV

SEQ ID NO: 664 - protein, 11 aa, Artificial Sequence
  Synthetic Polypeptide
GGNNIGSKNVH

SEQ ID NO: 665 - protein, 7 aa, Artificial Sequence
  Synthetic Polypeptide
RDSNRPS

SEQ ID NO: 666 - protein, 9 aa, Artificial Sequence
  Synthetic Polypeptide
QVWDSSTVV

SEQ ID NO: 667 - protein, 5 aa, Artificial Sequence
  Synthetic Polypeptide
NYGMH

SEQ ID NO: 668 - protein, 17 aa, Artificial Sequence
  Synthetic Polypeptide
VISYDGSNKYYADSVKG

SEQ ID NO: 669 - protein, 19 aa, Artificial Sequence
  Synthetic Polypeptide
VYYGSGIYYKKRYYYGMDV

SEQ ID NO: 670 - protein, 11 aa, Artificial Sequence
  Synthetic Polypeptide
GGNNIGSKNVH

SEQ ID NO: 671 - protein, 7 aa, Artificial Sequence
  Synthetic Polypeptide
RNSNRPS

SEQ ID NO: 672 - protein, 9 aa, Artificial Sequence
  Synthetic Polypeptide
QIWDSSTVV

SEQ ID NO: 673 - protein, 5 aa, Artificial Sequence
  Synthetic Polypeptide
RNGMH

SEQ ID NO: 674 - protein, 17 aa, Artificial Sequence
  Synthetic Polypeptide
VISNDGSNKYYADSVKG

SEQ ID NO: 675 - protein, 19 aa, Artificial Sequence
  Synthetic Polypeptide
VYYGSGIYYKKNYYYGMDV

SEQ ID NO: 676 - protein, 11 aa, Artificial Sequence
  Synthetic Polypeptide
GGNNIGSKNVH

SEQ ID NO: 677 - protein, 7 aa, Artificial Sequence
  Synthetic Polypeptide
RDSNRPS

SEQ ID NO: 678 - protein, 9 aa, Artificial Sequence
  Synthetic Polypeptide
QVWDSSTVV

SEQ ID NO: 679 - protein, 5 aa, Artificial Sequence
  Synthetic Polypeptide
NNGMH

SEQ ID NO: 680 - protein, 17 aa, Artificial Sequence
  Synthetic Polypeptide
VISYDGSNKYYTDSVKG

SEQ ID NO: 681 - protein, 19 aa, Artificial Sequence
  Synthetic Polypeptide
VYYGSGIYYKKRYYYGMDV

SEQ ID NO: 682 - protein, 11 aa, Artificial Sequence
  Synthetic Polypeptide
EGNNIGSQNVH

SEQ ID NO: 683 - protein, 7 aa, Artificial Sequence
  Synthetic Polypeptide
RDSNRPS

SEQ ID NO: 684 - protein, 9 aa, Artificial Sequence
  Synthetic Polypeptide
QVWDGSAVV

SEQ ID NO: 685 - protein, 5 aa, Artificial Sequence
  Synthetic Polypeptide
SYGMH

SEQ ID NO: 686 - protein, 17 aa, Artificial Sequence
  Synthetic Polypeptide
VISYDGSNKYYADSVKG

SEQ ID NO: 687 - protein, 19 aa, Artificial Sequence
  Synthetic Polypeptide
VYYGSGIYYKKRYYYGMDV

SEQ ID NO: 688 - protein, 11 aa, Artificial Sequence
  Synthetic Polypeptide
EGNNIGSQNVH

SEQ ID NO: 689 - protein, 7 aa, Artificial Sequence
  Synthetic Polypeptide
RDSNRPS

SEQ ID NO: 690 - protein, 9 aa, Artificial Sequence
  Synthetic Polypeptide
QVWDGSAVV

SEQ ID NO: 691 - protein, 5 aa, Artificial Sequence
  Synthetic Polypeptide
NYGFH

SEQ ID NO: 692 - protein, 17 aa, Artificial Sequence
  Synthetic Polypeptide
VISYDGSNRYYADSVKG

SEQ ID NO: 693 - protein, 19 aa, Artificial Sequence
  Synthetic Polypeptide
VYYGSGTYYKNRYYYGMDV

SEQ ID NO: 694 - protein, 11 aa, Artificial Sequence
  Synthetic Polypeptide
GGHNIGSKGVH

SEQ ID NO: 695 - protein, 7 aa, Artificial Sequence
  Synthetic Polypeptide
RNSNRPS

SEQ ID NO: 696 - protein, 9 aa, Artificial Sequence
  Synthetic Polypeptide
QAWDSGTVV

SEQ ID NO: 697 - protein, 5 aa, Artificial Sequence
  Synthetic Polypeptide
NYGFH

SEQ ID NO: 698 - protein, 17 aa, Artificial Sequence
  Synthetic Polypeptide
VISYDGSNRYYADSVKG

SEQ ID NO: 699 - protein, 19 aa, Artificial Sequence
  Synthetic Polypeptide
VYYGSGTYYKNRYYYGMDV

SEQ ID NO: 700 - protein, 11 aa, Artificial Sequence
  Synthetic Polypeptide
GANNIGSKNVH

SEQ ID NO: 701 - protein, 7 aa, Artificial Sequence
  Synthetic Polypeptide
RDFNRPS

SEQ ID NO: 702 - protein, 11 aa, Artificial Sequence
  Synthetic Polypeptide
QVWDSSTGNVV

SEQ ID NO: 703 - protein, 5 aa, Artificial Sequence
  Synthetic Polypeptide
NYGFH

SEQ ID NO: 704 - protein, 17 aa, Artificial Sequence
  Synthetic Polypeptide
VISYDGSNKYYADSVKG

SEQ ID NO: 705 - protein, 19 aa, Artificial Sequence
  Synthetic Polypeptide
VYYGSGSYYKNRYYYGMDV

SEQ ID NO: 706 - protein, 11 aa, Artificial Sequence
  Synthetic Polypeptide
GGNNIGSKNVH

SEQ ID NO: 707 - protein, 7 aa, Artificial Sequence
  Synthetic Polypeptide
RDSNRPS

SEQ ID NO: 708 - protein, 9 aa, Artificial Sequence
  Synthetic Polypeptide
QVWDSSTVV

SEQ ID NO: 709 - protein, 5 aa, Artificial Sequence
  Synthetic Polypeptide
NYGMH

SEQ ID NO: 710 - protein, 17 aa, Artificial Sequence
  Synthetic Polypeptide
VISYDGSNKYYADSVKG

SEQ ID NO: 711 - protein, 19 aa, Artificial Sequence
  Synthetic Polypeptide
VYYGSGIYYKKRYYYGMDV

SEQ ID NO: 712 - protein, 11 aa, Artificial Sequence
  Synthetic Polypeptide
GGNNIGSKNVH

SEQ ID NO: 713 - protein, 7 aa, Artificial Sequence
  Synthetic Polypeptide
RDSNRPS

SEQ ID NO: 714 - protein, 11 aa, Artificial Sequence
  Synthetic Polypeptide
QVWDSSSAHVI

SEQ ID NO: 715 - protein, 5 aa, Artificial Sequence
  Synthetic Polypeptide
GYGMH

SEQ ID NO: 716 - protein, 17 aa, Artificial Sequence
  Synthetic Polypeptide
VISYDGSNKYYADSVKG

SEQ ID NO: 717 - protein, 19 aa, Artificial Sequence
  Synthetic Polypeptide
VYYGSGIYYKNRYYYGMDV

SEQ ID NO: 718 - protein, 11 aa, Artificial Sequence
  Synthetic Polypeptide
GGNNLGSKNVH

SEQ ID NO: 719 - protein, 7 aa, Artificial Sequence
  Synthetic Polypeptide
RNSNRPS

SEQ ID NO: 720 - protein, 9 aa, Artificial Sequence
  Synthetic Polypeptide
QVWDSSTVV

SEQ ID NO: 721 - protein, 5 aa, Artificial Sequence
  Synthetic Polypeptide
NNGMH

SEQ ID NO: 722 - protein, 17 aa, Artificial Sequence
  Synthetic Polypeptide
VISYDGSNKYYADSVKG

SEQ ID NO: 723 - protein, 19 aa, Artificial Sequence
  Synthetic Polypeptide
VYYGSGIYYKNRYYYGMDV

SEQ ID NO: 724 - protein, 11 aa, Artificial Sequence
  Synthetic Polypeptide
GGNRIGSKNVH

SEQ ID NO: 725 - protein, 7 aa, Artificial Sequence
  Synthetic Polypeptide
RDSNRPS

SEQ ID NO: 726 - protein, 9 aa, Artificial Sequence
  Synthetic Polypeptide
QVWDSSTVV

SEQ ID NO: 727 - protein, 5 aa, Artificial Sequence
  Synthetic Polypeptide
NYGFH

SEQ ID NO: 728 - protein, 17 aa, Artificial Sequence
  Synthetic Polypeptide
VISYDGSNRYYADSVKG

SEQ ID NO: 729 - protein, 19 aa, Artificial Sequence
  Synthetic Polypeptide
VYYGSGTYYKNRYYYGMDV

SEQ ID NO: 730 - protein, 11 aa, Artificial Sequence
  Synthetic Polypeptide
GGHNIGSKGVH

SEQ ID NO: 731 - protein, 7 aa, Artificial Sequence
  Synthetic Polypeptide
RNSNRPS

SEQ ID NO: 732 - protein, 9 aa, Artificial Sequence
  Synthetic Polypeptide
QVWDSSTVV

SEQ ID NO: 733 - protein, 5 aa, Artificial Sequence
  Synthetic Polypeptide
NYGMH

SEQ ID NO: 734 - protein, 17 aa, Artificial Sequence
  Synthetic Polypeptide
VISYDGSNKYYADSVKG

SEQ ID NO: 735 - protein, 19 aa, Artificial Sequence
  Synthetic Polypeptide
VYYGSGIYYKNRYYYGMDV

SEQ ID NO: 736 - protein, 11 aa, Artificial Sequence
  Synthetic Polypeptide
GGHNIGSKGVH

SEQ ID NO: 737 - protein, 7 aa, Artificial Sequence
  Synthetic Polypeptide
RNSNRPS

SEQ ID NO: 738 - protein, 9 aa, Artificial Sequence
  Synthetic Polypeptide
QVWDSSTVV

SEQ ID NO: 739 - protein, 5 aa, Artificial Sequence
  Synthetic Polypeptide
NNGMH

SEQ ID NO: 740 - protein, 17 aa, Artificial Sequence
  Synthetic Polypeptide
VISNDGSNKYYADSVRG

SEQ ID NO: 741 - protein, 19 aa, Artificial Sequence
  Synthetic Polypeptide
VYYGSGIYYKNRYYYGMDV

SEQ ID NO: 742 - protein, 11 aa, Artificial Sequence
  Synthetic Polypeptide
GGNNIGSKNVH

SEQ ID NO: 743 - protein, 7 aa, Artificial Sequence
  Synthetic Polypeptide
RNSNRPS

SEQ ID NO: 744 - protein, 9 aa, Artificial Sequence
  Synthetic Polypeptide
QVWDSSTVV

SEQ ID NO: 745 - protein, 5 aa, Artificial Sequence
  Synthetic Polypeptide
NNGMH

SEQ ID NO: 746 - protein, 17 aa, Artificial Sequence
  Synthetic Polypeptide
VISNDGSNKYYADSVRG

SEQ ID NO: 747 - protein, 19 aa, Artificial Sequence
  Synthetic Polypeptide
VYYGSGIYYKNRYYYGMDV

SEQ ID NO: 748 - protein, 11 aa, Artificial Sequence
  Synthetic Polypeptide
EGNNIGSKNVH

SEQ ID NO: 749 - protein, 7 aa, Artificial Sequence
  Synthetic Polypeptide
RDSNRPS

SEQ ID NO: 750 - protein, 9 aa, Artificial Sequence
  Synthetic Polypeptide
QVWDSSAVV

SEQ ID NO: 751 - protein, 5 aa, Artificial Sequence
  Synthetic Polypeptide
SSGMH

SEQ ID NO: 752 - protein, 17 aa, Artificial Sequence
  Synthetic Polypeptide
VISNDGSNKYYADSVKG

SEQ ID NO: 753 - protein, 19 aa, Artificial Sequence
  Synthetic Polypeptide
VYYGSGIYYKNNYYYGMDV

SEQ ID NO: 754 - protein, 11 aa, Artificial Sequence
  Synthetic Polypeptide
GGNNIGSKNVH

SEQ ID NO: 755 - protein, 7 aa, Artificial Sequence
  Synthetic Polypeptide
RNSNRPS

SEQ ID NO: 756 - protein, 9 aa, Artificial Sequence
  Synthetic Polypeptide
QAWDSSTVV

SEQ ID NO: 757 - protein, 5 aa, Artificial Sequence
  Synthetic Polypeptide
NYGMH

SEQ ID NO: 758 - protein, 17 aa, Artificial Sequence
  Synthetic Polypeptide
VISYDGSNKYYADSVKG

SEQ ID NO: 759 - protein, 19 aa, Artificial Sequence
  Synthetic Polypeptide
VYYGSGIYYKKRYYYGMDV

SEQ ID NO: 760 - protein, 11 aa, Artificial Sequence
  Synthetic Polypeptide
GGNNIGSQNVH

SEQ ID NO: 761 - protein, 7 aa, Artificial Sequence
  Synthetic Polypeptide
RDSNRPS

SEQ ID NO: 762 - protein, 9 aa, Artificial Sequence
  Synthetic Polypeptide
QVWDSSAVV

SEQ ID NO: 763 - protein, 5 aa, Artificial Sequence
  Synthetic Polypeptide
SSGMH

SEQ ID NO: 764 - protein, 17 aa, Artificial Sequence
  Synthetic Polypeptide
VISNDGSNKYYADSVKG

SEQ ID NO: 765 - protein, 19 aa, Artificial Sequence
  Synthetic Polypeptide
VYYGSGIYYKNRYYYGMDV

SEQ ID NO: 766 - protein, 11 aa, Artificial Sequence
  Synthetic Polypeptide
GGNNIGSKNVH

SEQ ID NO: 767 - protein, 7 aa, Artificial Sequence
  Synthetic Polypeptide
RDSNRPS

SEQ ID NO: 768 - protein, 9 aa, Artificial Sequence
  Synthetic Polypeptide
QAWDSGTVV

SEQ ID NO: 769 - protein, 5 aa, Artificial Sequence
  Synthetic Polypeptide
NYGMH

SEQ ID NO: 770 - protein, 17 aa, Artificial Sequence
  Synthetic Polypeptide
VISYDGSNKYYADSVKG

SEQ ID NO: 771 - protein, 19 aa, Artificial Sequence
  Synthetic Polypeptide
VYYGSGIYYKKRYYYGMDV

SEQ ID NO: 772 - protein, 11 aa, Artificial Sequence
  Synthetic Polypeptide
GGNNIGGKNVH

SEQ ID NO: 773 - protein, 7 aa, Artificial Sequence
  Synthetic Polypeptide
RDSNRPS

SEQ ID NO: 774 - protein, 9 aa, Artificial Sequence
  Synthetic Polypeptide
QVWDSSTVV

SEQ ID NO: 775 - protein, 5 aa, Artificial Sequence
  Synthetic Polypeptide
RNGMH

SEQ ID NO: 776 - protein, 17 aa, Artificial Sequence
  Synthetic Polypeptide
VISNDGSNKYYADSVKG

SEQ ID NO: 777 - protein, 19 aa, Artificial Sequence
  Synthetic Polypeptide
VYYGSGIYYKNNYYYGMDV

SEQ ID NO: 778 - protein, 11 aa, Artificial Sequence
  Synthetic Polypeptide
GGNNIGSKNVH

SEQ ID NO: 779 - protein, 7 aa, Artificial Sequence
  Synthetic Polypeptide
RNSNRPS

SEQ ID NO: 780 - protein, 9 aa, Artificial Sequence
  Synthetic Polypeptide
QVWDSSTVV

SEQ ID NO: 781 - protein, 5 aa, Artificial Sequence
  Synthetic Polypeptide
RNGMH

SEQ ID NO: 782 - protein, 17 aa, Artificial Sequence
  Synthetic Polypeptide
VISNDGSNKYYADSVKG

SEQ ID NO: 783 - protein, 19 aa, Artificial Sequence
  Synthetic Polypeptide
VYYGSGIYYKNNYYYGMDV

SEQ ID NO: 784 - protein, 11 aa, Artificial Sequence
  Synthetic Polypeptide
GGNNIESKNVH

SEQ ID NO: 785 - protein, 7 aa, Artificial Sequence
  Synthetic Polypeptide
RDSNRPS

SEQ ID NO: 786 - protein, 9 aa, Artificial Sequence
  Synthetic Polypeptide
QVWDSSTVV

SEQ ID NO: 787 - protein, 5 aa, Artificial Sequence
  Synthetic Polypeptide
NARMG

SEQ ID NO: 788 - protein, 19 aa, Artificial Sequence
  Synthetic Polypeptide
RIKSKTEGGTRDYAAPVKG

SEQ ID NO: 789 - protein, 4 aa, Artificial Sequence
  Synthetic Polypeptide
YSGV

SEQ ID NO: 790 - protein, 17 aa, Artificial Sequence
  Synthetic Polypeptide
KSSQSVLYSSNNRNYLA

SEQ ID NO: 791 - protein, 7 aa, Artificial Sequence
  Synthetic Polypeptide
WASTRES

SEQ ID NO: 792 - protein, 9 aa, Artificial Sequence
  Synthetic Polypeptide
QQYYSIPIT

SEQ ID NO: 793 - protein, 5 aa, Artificial Sequence
  Synthetic Polypeptide
NYGFH

SEQ ID NO: 794 - protein, 17 aa, Artificial Sequence
  Synthetic Polypeptide
VISYDGSNRYYASSVKG

SEQ ID NO: 795 - protein, 19 aa, Artificial Sequence
  Synthetic Polypeptide
VYYGSGTYYKNRYYYGMDV

SEQ ID NO: 796 - protein, 11 aa, Artificial Sequence
  Synthetic Polypeptide
GGHNIGSKGVH

SEQ ID NO: 797 - protein, 7 aa, Artificial Sequence
  Synthetic Polypeptide
RAANRPS

SEQ ID NO: 798 - protein, 9 aa, Artificial Sequence
  Synthetic Polypeptide
QAFDAGTVV

SEQ ID NO: 799 - protein, 5 aa, Artificial Sequence
  Synthetic Polypeptide
NYGFH

SEQ ID NO: 800 - protein, 17 aa, Artificial Sequence
  Synthetic Polypeptide
VISYAGSNRYYAASVKG

SEQ ID NO: 801 - protein, 19 aa, Artificial Sequence
  Synthetic Polypeptide
VYYGSGTYYKNRYYYGMDV

SEQ ID NO: 802 - protein, 11 aa, Artificial Sequence
  Synthetic Polypeptide
GGHNIGSKGVH

SEQ ID NO: 803 - protein, 7 aa, Artificial Sequence
  Synthetic Polypeptide
RQSNRPS

SEQ ID NO: 804 - protein, 9 aa, Artificial Sequence
  Synthetic Polypeptide
QAFDAGTVV

SEQ ID NO: 805 - protein, 5 aa, Artificial Sequence
  Synthetic Polypeptide
NYGFH

SEQ ID NO: 806 - protein, 17 aa, Artificial Sequence
  Synthetic Polypeptide
VISYSGSNRYYADSVKG

SEQ ID NO: 807 - protein, 19 aa, Artificial Sequence
  Synthetic Polypeptide
VYYGSGTYYKNRYYYGMDV

SEQ ID NO: 808 - protein, 11 aa, Artificial Sequence
  Synthetic Polypeptide
GGHNIGSKGVH

SEQ ID NO: 809 - protein, 7 aa, Artificial Sequence
  Synthetic Polypeptide
RQSNRPS

SEQ ID NO: 810 - protein, 9 aa, Artificial Sequence
  Synthetic Polypeptide
QAFDAGTVV

SEQ ID NO: 811 - protein, 11 aa, Artificial Sequence
  Synthetic Polypeptide
GGHNIGSKGVH

SEQ ID NO: 812 - protein, 7 aa, Artificial Sequence
  Synthetic Polypeptide
RNSNRPS

SEQ ID NO: 813 - protein, 9 aa, Artificial Sequence
  Synthetic Polypeptide
QVWDISTVV

SEQ ID NO: 814 - protein, 5 aa, Artificial Sequence
  Synthetic Polypeptide
NCGMH

SEQ ID NO: 815 - protein, 17 aa, Artificial Sequence
  Synthetic Polypeptide
VISYDGGNKYHADSVKG

SEQ ID NO: 816 - protein, 19 aa, Artificial Sequence
  Synthetic Polypeptide
VYYGSGIYYKNRYYYGMDV

SEQ ID NO: 817 - protein, 11 aa, Artificial Sequence
  Synthetic Polypeptide
GGHNIGSKGVH

SEQ ID NO: 818 - protein, 7 aa, Artificial Sequence
  Synthetic Polypeptide
RNSNRPS

SEQ ID NO: 819 - protein, 9 aa, Artificial Sequence
  Synthetic Polypeptide
QVWDSSTVV

SEQ ID NO: 820 - protein, 5 aa, Artificial Sequence
  Synthetic Polypeptide
NCGMH

SEQ ID NO: 821 - protein, 17 aa, Artificial Sequence
  Synthetic Polypeptide
VISYDGGNKYYADSVKG

SEQ ID NO: 822 - protein, 19 aa, Artificial Sequence
  Synthetic Polypeptide
VYYGSGIYYKNRYYYGMDV

SEQ ID NO: 823 - protein, 11 aa, Artificial Sequence
  Synthetic Polypeptide
GGNNIGSKNVH

SEQ ID NO: 824 - protein, 7 aa, Artificial Sequence
  Synthetic Polypeptide
RDSNRPS

SEQ ID NO: 825 - protein, 9 aa, Artificial Sequence
  Synthetic Polypeptide
QVWDSNTVV

SEQ ID NO: 826 - protein, 5 aa, Artificial Sequence
  Synthetic Polypeptide
NNGMH

SEQ ID NO: 827 - protein, 17 aa, Artificial Sequence
  Synthetic Polypeptide
VISNDGSNKYYADSVRG

SEQ ID NO: 828 - protein, 19 aa, Artificial Sequence
  Synthetic Polypeptide
VYYGSGIYYKNNYYYGMDV

SEQ ID NO: 829 - protein, 11 aa, Artificial Sequence
  Synthetic Polypeptide
GGNNIGSKNVH

SEQ ID NO: 830 - protein, 7 aa, Artificial Sequence
  Synthetic Polypeptide
RNSNRPS

SEQ ID NO: 831 - protein, 9 aa, Artificial Sequence
  Synthetic Polypeptide
QVWDSSTVV

SEQ ID NO: 832 - protein, 5 aa, Artificial Sequence
  Synthetic Polypeptide
TYGMH

SEQ ID NO: 833 - protein, 17 aa, Artificial Sequence
  Synthetic Polypeptide
VISYDGSNKYYADSVKG

SEQ ID NO: 834 - protein, 19 aa, Artificial Sequence
  Synthetic Polypeptide
VYYGSGSYYKKNYYYGMDV

SEQ ID NO: 835 - protein, 11 aa, Artificial Sequence
  Synthetic Polypeptide
GGNNIGGKNVH

SEQ ID NO: 836 - protein, 7 aa, Artificial Sequence
  Synthetic Polypeptide
RDSNRPS

SEQ ID NO: 837 - protein, 9 aa, Artificial Sequence
  Synthetic Polypeptide
QVWDSSTVV

SEQ ID NO: 838 - protein, 5 aa, Artificial Sequence
  Synthetic Polypeptide
SYGFH

SEQ ID NO: 839 - protein, 17 aa, Artificial Sequence
  Synthetic Polypeptide
VISYDGSNKYYADSVKG

SEQ ID NO: 840 - protein, 19 aa, Artificial Sequence
  Synthetic Polypeptide
VYYGSGTYYKNRYYYGMDV

SEQ ID NO: 841 - protein, 11 aa, Artificial Sequence
  Synthetic Polypeptide
GGNNIGSKNVH

SEQ ID NO: 842 - protein, 7 aa, Artificial Sequence
  Synthetic Polypeptide
RDSNRPS

SEQ ID NO: 843 - protein, 9 aa, Artificial Sequence
  Synthetic Polypeptide
QVWDSSTVV

SEQ ID NO: 844 - protein, 5 aa, Artificial Sequence
  Synthetic Polypeptide
NNGMH

SEQ ID NO: 845 - protein, 17 aa, Artificial Sequence
  Synthetic Polypeptide
VISNDGSNKYYPDSVKG

SEQ ID NO: 846 - protein, 19 aa, Artificial Sequence
  Synthetic Polypeptide
VYYGSGNYYKNNYYYGMDV

SEQ ID NO: 847 - protein, 11 aa, Artificial Sequence
  Synthetic Polypeptide
EGNNIGSQNVH

SEQ ID NO: 848 - protein, 7 aa, Artificial Sequence
  Synthetic Polypeptide
RDSNRPS

SEQ ID NO: 849 - protein, 9 aa, Artificial Sequence
  Synthetic Polypeptide
QVWDGSAVV

SEQ ID NO: 850 - protein, 5 aa, Artificial Sequence
  Synthetic Polypeptide
SSGMH

SEQ ID NO: 851 - protein, 17 aa, Artificial Sequence
  Synthetic Polypeptide
VISHDGSNKYYADSVKG

SEQ ID NO: 852 - protein, 19 aa, Artificial Sequence
  Synthetic Polypeptide
VYYGSGIYYKNRYYYGMDV

SEQ ID NO: 853 - protein, 11 aa, Artificial Sequence
  Synthetic Polypeptide
GGHNIGSKGVH

SEQ ID NO: 854 - protein, 7 aa, Artificial Sequence
  Synthetic Polypeptide
RNSNRPS

SEQ ID NO: 855 - protein, 9 aa, Artificial Sequence
  Synthetic Polypeptide
QVWDSSTVV

SEQ ID NO: 856 - protein, 5 aa, Artificial Sequence
  Synthetic Polypeptide
DCGMH

SEQ ID NO: 857 - protein, 17 aa, Artificial Sequence
  Synthetic Polypeptide
VISYDGGNKYYADSVKG

SEQ ID NO: 858 - protein, 19 aa, Artificial Sequence
  Synthetic Polypeptide
VYYGSGIYYKNRYYYGMDV

SEQ ID NO: 859 - protein, 11 aa, Artificial Sequence
  Synthetic Polypeptide
GGNNIGSKNVH

SEQ ID NO: 860 - protein, 7 aa, Artificial Sequence
  Synthetic Polypeptide
RSSNRPS

SEQ ID NO: 861 - protein, 9 aa, Artificial Sequence
  Synthetic Polypeptide
QIWDSSTVV

SEQ ID NO: 862 - protein, 5 aa, Artificial Sequence
  Synthetic Polypeptide
SYGMH

SEQ ID NO: 863 - protein, 17 aa, Artificial Sequence
  Synthetic Polypeptide
VISFDGNNKYYADSVKG

SEQ ID NO: 864 - protein, 19 aa, Artificial Sequence
  Synthetic Polypeptide
VYYGSGSYYKNRYYYGMDV

SEQ ID NO: 865 - protein, 11 aa, Artificial Sequence
  Synthetic Polypeptide
GGNNIGSKNVH

SEQ ID NO: 866 - protein, 7 aa, Artificial Sequence
  Synthetic Polypeptide
RDSNRPS

SEQ ID NO: 867 - protein, 9 aa, Artificial Sequence
  Synthetic Polypeptide
QVWDSSTVV

SEQ ID NO: 868 - protein, 5 aa, Artificial Sequence
  Synthetic Polypeptide
SNGMH

SEQ ID NO: 869 - protein, 17 aa, Artificial Sequence
  Synthetic Polypeptide
VISNDGSNKYYGDSVKG

SEQ ID NO: 870 - protein, 19 aa, Artificial Sequence
  Synthetic Polypeptide
VYYGSGIYYRNNYYYGMDV

SEQ ID NO: 871 - protein, 11 aa, Artificial Sequence
  Synthetic Polypeptide
GGNNIGSKNVH

SEQ ID NO: 872 - protein, 7 aa, Artificial Sequence
  Synthetic Polypeptide
RNTNRPS

SEQ ID NO: 873 - protein, 9 aa, Artificial Sequence
  Synthetic Polypeptide
QVWDSSTVV

SEQ ID NO: 874 - protein, 5 aa, Artificial Sequence
  Synthetic Polypeptide
GYGMH

SEQ ID NO: 875 - protein, 17 aa, Artificial Sequence
  Synthetic Polypeptide
VISYDGSNKYYADSVKG

SEQ ID NO: 876 - protein, 19 aa, Artificial Sequence
  Synthetic Polypeptide
VYYGSGIYYKNRYYYGMDV

SEQ ID NO: 877 - protein, 11 aa, Artificial Sequence
  Synthetic Polypeptide
GGNNIGSKNVH

SEQ ID NO: 878 - protein, 7 aa, Artificial Sequence
  Synthetic Polypeptide
RNTNRPS

SEQ ID NO: 879 - protein, 9 aa, Artificial Sequence
  Synthetic Polypeptide
QVWDSSTVV

SEQ ID NO: 880 - protein, 5 aa, Artificial Sequence
  Synthetic Polypeptide
GYGMH

SEQ ID NO: 881 - protein, 17 aa, Artificial Sequence
  Synthetic Polypeptide
VISYDGSNKYYADSVKG

SEQ ID NO: 882 - protein, 19 aa, Artificial Sequence
  Synthetic Polypeptide
VYYGSGIYYKNRYYYGMDV

SEQ ID NO: 883 - protein, 11 aa, Artificial Sequence
  Synthetic Polypeptide
GGNNIGDKNVH

SEQ ID NO: 884 - protein, 7 aa, Artificial Sequence
  Synthetic Polypeptide
RNNVRPS

SEQ ID NO: 885 - protein, 9 aa, Artificial Sequence
  Synthetic Polypeptide
QVWDSSTVV

SEQ ID NO: 886 - protein, 5 aa, Artificial Sequence
  Synthetic Polypeptide
NFGMH

SEQ ID NO: 887 - protein, 17 aa, Artificial Sequence
  Synthetic Polypeptide
VISYDGGNKYYADSVKG

SEQ ID NO: 888 - protein, 19 aa, Artificial Sequence
  Synthetic Polypeptide
VYYGSGSYYKKRYYYGMDV

SEQ ID NO: 889 - protein, 11 aa, Artificial Sequence
  Synthetic Polypeptide
GGNNIGSKNVH

SEQ ID NO: 890 - protein, 7 aa, Artificial Sequence
  Synthetic Polypeptide
RDSNRPS

SEQ ID NO: 891 - protein, 9 aa, Artificial Sequence
  Synthetic Polypeptide
QVWDSSTVV

SEQ ID NO: 892 - protein, 5 aa, Artificial Sequence
  Synthetic Polypeptide
SCGMH

SEQ ID NO: 893 - protein, 17 aa, Artificial Sequence
  Synthetic Polypeptide
VISYDGTNKYYADSVKG

SEQ ID NO: 894 - protein, 19 aa, Artificial Sequence
  Synthetic Polypeptide
VYYGSGIYYKKNYYYGMDV

SEQ ID NO: 895 - protein, 5 aa, Artificial Sequence
  Synthetic Polypeptide
NARMG

SEQ ID NO: 896 - protein, 19 aa, Artificial Sequence
  Synthetic Polypeptide
RIKSKTEGGTRDYAAPVKG

SEQ ID NO: 897 - protein, 4 aa, Artificial Sequence
  Synthetic Polypeptide
YSGV

SEQ ID NO: 898 - protein, 17 aa, Artificial Sequence
  Synthetic Polypeptide
KSSQSVLYSSNNKNYLA

SEQ ID NO: 899 - protein, 7 aa, Artificial Sequence
  Synthetic Polypeptide
WASTRES

SEQ ID NO: 900 - protein, 9 aa, Artificial Sequence
  Synthetic Polypeptide
QQYYSIPIT

SEQ ID NO: 901 - protein, 128 aa, Artificial Sequence
  Synthetic Polypeptide
QVQLVESGGGVVQPGRSLRLSCVVSGFNFSNNGMHWVRQAPGKGLEWVAVISNDGSNKYYADSVKGRFTISRDNSKNTLYLQMNSLRTEDTAVYYCAKVYYGSGIYYKNRNYYGMDVWGQGTTVTVSS

SEQ ID NO: 902 - protein, 106 aa, Artificial Sequence
  Synthetic Polypeptide
SYELTQPPSVSVALGQTARITCGGNNIGSQNVHWYQQKPGQAPVLVIYRDSNRPSGIPDRFSGSKSGNTATLTISRAQAGDEADYYCQVWDSSTVVFGGGTKLTVL

SEQ ID NO: 903 - protein, 128 aa, Artificial Sequence
  Synthetic Polypeptide
QVQLVESGGGVVQPGRSLRLSCAASGFNFSNYGMHWVRQAPGKGLEWVAVISYDGSNKYYADSVKGRFTISRDNSKNTLYLQMNSLRAEDTAVYFCARVYYGSGIYYKKRYYYGMDVWGQGTTVTVSS

SEQ ID NO: 904 - protein, 106 aa, Artificial Sequence
  Synthetic Polypeptide
SYELTQPPSVSVALGQTARITCGGHNIGSKGVHWYQQKPGQAPVLVIYRNSNRPSGIPERFSGSNSGNTATLTITRAQAGDEADYYCQVWDSSTVVFGGGTKLTVL

SEQ ID NO: 905 - protein, 128 aa, Artificial Sequence
  Synthetic Polypeptide
QVQLVESGGGVVQPGRSLRLSCAPSGFNFSNYGMHWVRQAPGKGLEWVAVISYDGSNKYYADSVKGRFTISRDNSKNTLFLQMNSLRAEDTAVYFCARVYYGSGSYYKKRYYYGMDVWGQGTTVTVSS

SEQ ID NO: 906 - protein, 106 aa, Artificial Sequence
  Synthetic Polypeptide
SYELTQPPSVSVALGQTARITCGGNNIGSQNVHWYQQKPGQAPVLVIYRDSNRPSGIPERFSGSKSGNTATLTISRAQAGDEADYYCQVWDSSTVVFGGGTQLTVL

SEQ ID NO: 907 - protein, 128 aa, Artificial Sequence
  Synthetic Polypeptide
QVQLVESGGGVVQPGRSLRLSCAASGFTFSSSGMHWVRQAPGKGLEWVAVISYDGTNKYYADSVKGRFTISRDNSKNTLYLQMNSLRAEDTAVYYCAKVYYGSGIYYKNRYYYGMDVWGQGTTVTVSS

SEQ ID NO: 908 - protein, 106 aa, Artificial Sequence
  Synthetic Polypeptide
SYELTQPPSVSVALGQTARITCGGHNIGSKGVHWYQQKPGQAPVLVIYRNSNRPSGIPERFSGSNSGNTATLTISRAQAGDEADYYCQVWDSSTVVFGGGTQLTVL

SEQ ID NO: 909 - protein, 128 aa, Artificial Sequence
  Synthetic Polypeptide
QVQLVESGGGVVQPGRSLRLSCAVSGFNFSNYGMHWVRQVPGRGLDWVAVISNDGSNKYYADSVKGRFTISRDNSKNTLYLQMDSLRTEDTAVYYCAKVYYGSGIYYKKRYYYGMDVWGQGTTVTVSS

SEQ ID NO: 910 - protein, 106 aa, Artificial Sequence
  Synthetic Polypeptide
SYELTQPPSVSVALGQTARITCGGHNIGSQNVHWYQQKPGQAPVLVIYRDSNRPSGIPERFSGSKSGNTATLTISRAQAGDEADYYCQVWDSSTVVFGGGTQLTVL

SEQ ID NO: 911 - protein, 128 aa, Artificial Sequence; identical to SEQ ID NO: 903
  Synthetic Polypeptide

SEQ ID NO: 912 - protein, 106 aa, Artificial Sequence
  Synthetic Polypeptide
SYELTQPPSVSVAPGQTARITCGGNNIGSKNVHWYQQKAGQAPVQVIYRNSNRPSGIPARFSGSNSGNTATLTISRAQAGDEADYYCQVWDSSTVVFGGGTKLTVL

SEQ ID NO: 913 - protein, 128 aa, Artificial Sequence
  Synthetic Polypeptide
QVQLVESGGGVVQPGRSLRLSCAASGFTFSSYGMHWVRQAPGKGLEWVAVISYDGSNKYYADSVKGRFTISRDNSKNTLYLQMNSLRGEDTAVYYCARVYYGSGSYYKNRYYYGMDVWGQGTTVTVSS

SEQ ID NO: 914 - protein, 105 aa, Artificial Sequence
  Synthetic Polypeptide
SYELTQPPSVSVAPGQTARIPCGGNNIGSKNVHWYQQKPGQAPVLVIYRDINRPSGIPERFSGSNSGNTATLTISRAQAGDEADYYCQVWDSSVVFGGGTKLTVL

SEQ ID NO: 915 - protein, 128 aa, Artificial Sequence; identical to SEQ ID NO: 903
  Synthetic Polypeptide

SEQ ID NO: 916 - protein, 106 aa, Artificial Sequence
  Synthetic Polypeptide
SYELTQPPSVSVALGQTARLTCEGNNIGSKNVHWYQQKPGQAPVLVIYRNSNRPSGIPERFSGSNSGNTATLTISRVQAGDEADYYCQAWDSSTVVFGGGTQLTVL

SEQ ID NO: 917 - protein, 128 aa, Artificial Sequence
  Synthetic Polypeptide
QVQLVESGGGLVKPGGSLRLSCAVSGFNFSNNGMHWVRQAPGKGLEWVAVISYDGSNKYYTDSVKGRFTISRDNSKNTLYLQMNSLRTEDTAVYYCAKVYYGSGIYYKKRYYYGMDVWGQGTTVTVSS

SEQ ID NO: 918 - protein, 108 aa, Artificial Sequence
  Synthetic Polypeptide
SYELTQPLSVSEALGQTARITCGGNNIGSKNVHWYQQKPGQAPVLVIYRDSNRPSGIPERFSGSNSGNAATLTISRVEAGDEADYYCQVWDSSSDHVVFGGGTQLTVL

SEQ ID NO: 919 - protein, 128 aa, Artificial Sequence; identical to SEQ ID NO: 903
  Synthetic Polypeptide

SEQ ID NO: 920 - protein, 106 aa, Artificial Sequence
  Synthetic Polypeptide
SYELTQPPSVSVAPGQTARITCGGNNIGSKNVHWYQQKPGQAPVLVIYRNSNRPSGIPERFSGSNSGNTATLTISGTQAMDEADYYCQAWDSSNVVFGGGTQLTVL

SEQ ID NO: 921 - protein, 128 aa, Artificial Sequence
  Synthetic Polypeptide
QVQLVESGGGVVQPGRSLRLSCVVSGFNFSRNGMHWVRQVPGRGLDWVAVISNDGSNKYYADSVKGRFTISRDNSKNTLYLQMNSLRAEDTAVYYCAKVYYGSGIYYKNNYYYGMDVWGQGTTVTVSS

SEQ ID NO: 922 - protein, 106 aa, Artificial Sequence
  Synthetic Polypeptide
SYELTQPLSVSVALGQTARITCGGNNIGSQNVHWYQQKPGQAPVLVIYRDSNRPSGIPDRFSGSKSGNTATLTISRAQAGDEADYYCQVWDSSTVVFGGGTQLTVL

SEQ ID NO: 923 - protein, 128 aa, Artificial Sequence
  Synthetic Polypeptide
QVQLVESGGGVVQPGRSLRLSCVVSGFNFSRNGMHWVRQVPGRGLDWVAVISNDGSNKYYADSVKGRFTISRDNSKNTLYLQMNSLRAEDTAVYYCAKVYYGSGIYYKNRYYYGMDVWGQGTTVTVSS

SEQ ID NO: 924 - protein, 106 aa, Artificial Sequence
  Synthetic Polypeptide
SYELTQPPSVSVAPGQTARITCGGNNIGSKNVHWYQQKPGQAPVLVIYRDSNRPSGIPERFSGSKSGTTATLTISRAQAGDEAEYYCQVWDSSTVVFGGGTELTVL

SEQ ID NO: 925 - protein, 128 aa, Artificial Sequence; identical to SEQ ID NO: 903
  Synthetic Polypeptide

SEQ ID NO: 926 - protein, 106 aa, Artificial Sequence
  Synthetic Polypeptide
SYELTQPLSVSVALGQTARITCGGNNIGSKNVHWYQQKPGQAPVLAIYRNSNRPSGIPERFTGSNSGNTATLTISRAQAGDESDYYCQIWDSSTVVFGGGTKLTVL

SEQ ID NO: 927 - protein, 128 aa, Artificial Sequence
  Synthetic Polypeptide
QVQLVESGGGVVQPGRSLRLSCAASGFNFSRNGMHWVRQVPGRGLDWVAVISNDGSNKYYADSVKGRFTISRDNSKNTLYLQMNSLRAEDTAVYYCAKVYYGSGIYYKKNYYYGMDVWGQGTTVTVSS

SEQ ID NO: 928 - protein, 106 aa, Artificial Sequence
  Synthetic Polypeptide
SYELTQPPSVSVALGQTARISCGGNNIGSKNVHWYQQKPGQAPVLVIYRDSNRPSGIPERFSGSKSGTTATLTISRAQAGDEAEYYCQVWDSSTVVFGGGTQLTVL

SEQ ID NO: 929 - protein, 128 aa, Artificial Sequence
  Synthetic Polypeptide
QVQLVESGGGVVQPGRSLRLSCAVSGFNFSNNGMHWVRQAPGKGLEWVAVISYDGSNKYYTDSVKGRFTISRDNSKNTLYLQMNSLRTEDTAVYYCAKVYYGSGIYYKKRYYYGMDVWGQGTTVTVSS

SEQ ID NO: 930 - protein, 106 aa, Artificial Sequence
  Synthetic Polypeptide
SYELTQPPSVSVALGQTARITCEGNNIGSQNVHWYQQKPGQAPVLVMYRDSNRPSGIPERFSGSKSGNTATLAISRAQAGDESDYYCQVWDGSAVVFGGGTKLTVL

SEQ ID NO: 931 - protein, 128 aa, Artificial Sequence
  Synthetic Polypeptide
QVQLVESGGGVVQPGRSLRLSCAASGFTFSSYGMHWVRQAPGKGLEWVAVISYDGSNKYYADSVKGRFTISRDNSKNTLYLQMNSLRAEDTAVYFCARVYYGSGIYYKKRYYYGMDVWGQGTTVTVSS

SEQ ID NO: 932 - protein, 106 aa, Artificial Sequence
  Synthetic Polypeptide
SYELTQPLSVSVALGQTARITCEGNNIGSQNVHWYQQKPGQAPVLVMYRDSNRPSGIPERFSGSKSGNTATLAISRAQAGDESDYYCQVWDGSAVVFGGGTQLTVL

SEQ ID NO: 933 - protein, 128 aa, Artificial Sequence
  Synthetic Polypeptide
QVQLVESGGGVVQPGRSLRLSCAASGFTFSNYGFHWVRQTPGKGLEWVAVISYDGSNRYYADSVKGRFTISRDNSKNTLYLQMNSLRGEDTALYYCARVYYGSGTYYKNRYYYGMDVWGQGTTVTVSS

SEQ ID NO: 934 - protein, 106 aa, Artificial Sequence
  Synthetic Polypeptide
SYELTQPPSVSVALGQTARITCGGHNIGSKGVHWYQQKPGQAPVLVIYRNSNRPSGIPERFSGSNSGNTATLTISGTQAMDEADYYCQAWDSGTVVFGGGTQLTVL

SEQ ID NO: 935 - protein, 128 aa, Artificial Sequence; identical to SEQ ID NO: 933
  Synthetic Polypeptide

SEQ ID NO: 936 - protein, 108 aa, Artificial Sequence
  Synthetic Polypeptide
SYELTQPPSVSVALGQTARITCGANNIGSKNVHWYQQKPGQPPVLVIYRDFNRPSGIPERFSASNSGNTATLTISRGQAGDEADYYCQVWDSSTGNVVFGGGTKLTVL

SEQ ID NO: 937 - protein, 128 aa, Artificial Sequence
  Synthetic Polypeptide
QVQLVESGGGVVQPGRSLRLSCAASGFIFSNYGFHWVRQTPGKGLEWVAVISYDGSNKYYADSVKGRFTISRDNSKNTLYLQMNSLRGEDTAVYYCARVYYGSGSYYKNRYYYGMDVWGQGTTVTVSS

SEQ ID NO: 938 - protein, 106 aa, Artificial Sequence
  Synthetic Polypeptide
SYELTQPPSVSVAPGQTARITCGGNNIGSKNVHWYQQKPGQAPVLVIYRDSNRPSGIPERFSGSKSGTTATLTISRAQAGDEADYYCQVWDSSTVVFGGGTELTVL

SEQ ID NO: 939 - protein, 128 aa, Artificial Sequence; identical to SEQ ID NO: 903
  Synthetic Polypeptide

SEQ ID NO: 940 - protein, 108 aa, Artificial Sequence
  Synthetic Polypeptide
SYELTQSSSVSVAPGQTARITCGGNNIGSKNVHWYQQKPGQAPVLVIYRDSNRPSGIPERFSGSKSGTTATLTISRVEAGDEADYYCQVWDSSSAHVIFGGGTKLTVL

SEQ ID NO: 941 - protein, 128 aa, Artificial Sequence
  Synthetic Polypeptide
QVQLVESGGGVVQPGRSLRLSCGASGFTFSGYGMHWVRQAPGKGLEWVAVISYDGSNKYYADSVKGRFTISRDNSKNTLYLQMNSLRGEDTAVYYCARVYYGSGIYYKNRYYYGMDVWGQGTTVTVSS

SEQ ID NO: 942 - protein, 106 aa, Artificial Sequence
  Synthetic Polypeptide
SYELTQPPSGSVALGQTARITCGGNNLGSKNVHWYQQKPGQAPVLVIYRNSNRPSGIPERFSGSNSGNTATLTISRAQAGDEADYYCQVWDSSTVVFGGGTKLTVL

SEQ ID NO: 943 - protein, 128 aa, Artificial Sequence
  Synthetic Polypeptide
QVQLVESGGGLVKPGGSLRLSCAASGFTFSNNGMHWVRQAPGKGLEWVAVISYDGSNKYYADSVKGRFTISRDNSKNTLYLQMNSLRAEDTAVYYCAKVYYGSGIYYKNRYYYGMDVWGQGTTVTVSS

SEQ ID NO: 944 - protein, 106 aa, Artificial Sequence
  Synthetic Polypeptide
SYELTQPPSVSVALGQTARITCGGNRIGSKNVHWYQQKPGQAPVLVIYRDSNRPSGIPERFSGSKSGTTATLTISRAQAGDEAEYYCQVWDSSTVVFGGGTKLTVL

SEQ ID NO: 945 - protein, 128 aa, Artificial Sequence; identical to SEQ ID NO: 933
  Synthetic Polypeptide

SEQ ID NO: 946 - protein, 106 aa, Artificial Sequence
  Synthetic Polypeptide
SYELTQLPSVSVALGQTARITCGGHNIGSKGVHWYQQKPGQAPVLVIYRNSNRPSGIPERFSGSNSGNTATLTISRAQAGDEADYYCQVWDSSTVVFGGGTELTVL

SEQ ID NO: 947 - protein, 128 aa, Artificial Sequence
  Synthetic Polypeptide
QVQLVESGGGVVQPGRSLRLSCAASGFNFSNYGMHWVRQAPGKGLEWVAVISYDGSNKYYADSVKGRFTISRDNSKNTLYLQMNSLRAEDTAVYFCARVYYGSGIYYKNRYYYGMDVWGQGTTVTVSS

SEQ ID NO: 948 - protein, 106 aa, Artificial Sequence; identical to SEQ ID NO: 908
  Synthetic Polypeptide

SEQ ID NO: 949 - protein, 128 aa, Artificial Sequence
  Synthetic Polypeptide
QVQLVESGGDLVQPGRSLRLSCAASGFTFSNNGMHWVRQAPGKGLEWVAVISNDGSNKYYADSVRGRFTISRDNSKNTLYLQMNSLRAEDTAVYYCAKVYYGSGIYYKNRYYYGMDVWGQGTTVTVSS

SEQ ID NO: 950 - protein, 106 aa, Artificial Sequence
  Synthetic Polypeptide
SYELTQPLSVSVALGQTARITCGGNNIGSKNVHWYQQKPGQAPVLVIYRNSNRPSGIPERFSGSNSGNTATLTLSRVQAGDEADYYCQVWDSSTVVFGGGTKLTVL

SEQ ID NO: 951 - protein, 128 aa, Artificial Sequence
  Synthetic Polypeptide
QVQLVESGGGVVQPGRSLRLSCAVSGFNFSNNGMHWVRQAPGKGLEWVAVISNDGSNKYYADSVRGRFTISRDNSKNTLYLQMDSLRTEDTAVYYCAKVYYGSGIYYKNRYYYGMDVWGQGTTVTVSS

SEQ ID NO: 952 - protein, 106 aa, Artificial Sequence
  Synthetic Polypeptide
SYELTQPPSVSVALGQTARLTCEGNNIGSKNVHWYQQKPGQAPVLVIYRDSNRPSGIPERFSGSKSGNTATLAISRAQAGDESDYYCQVWDSSAVVFGGGTKLTVL

SEQ ID NO: 953 - protein, 128 aa, Artificial Sequence
  Synthetic Polypeptide
QVQLVESGGGVVQPGRSLRLSCAASGFTFSSSGMHWVRQAPGKGLEWVAVISNDGSNKYYADSVKGRFTISRDNSKNTLYLQMNSLRAEDTAVYYCAKVYYGSGIYYKNNYYYGMDVWGQGTTVTVSS

SEQ ID NO: 954 - protein, 106 aa, Artificial Sequence
  Synthetic Polypeptide
SYELTQPPSVSVALGQTARITCGGNNIGSKNVHWYQQKPGQAPVLAIYRNSNRPSGIPERFTGSNSGNTATLTISGTQAMDEADYYCQAWDSSTVVFGGGTKLTVL

SEQ ID NO: 955 - protein, 128 aa, Artificial Sequence; identical to SEQ ID NO: 903
  Synthetic Polypeptide

SEQ ID NO: 956 - protein, 106 aa, Artificial Sequence
  Synthetic Polypeptide
SYELTQPPSVSVALGQTARITCGGNNIGSQNVHWYQQKPGQAPVLVIYRDSNRPSGIPERFSGSKSGNTATLAISRAQAGDESDYYCQVWDSSAVVFGGGTQLTVL

SEQ ID NO: 957 - protein, 128 aa, Artificial Sequence
  Synthetic Polypeptide
QVQLVESGGGVVQPGRSLRLSCAASGFTLSSSGMHWVRQAPGKGLEWVAVISNDGSNKYYADSVKGRFTISRDDSKNTLYLQMDSLRTEDTAVYYCAKVYYGSGIYYKNRYYYGMDVWGQGTTVTVSS

SEQ ID NO: 958 - protein, 106 aa, Artificial Sequence
  Synthetic Polypeptide
SYELTQPPSVSVALGQTARISCGGNNIGSKNVHWYQQKPGQAPVLVMYRDSNRPSGIPERFSGSNSGNTATLTISGTQAMDEADYYCQAWDSGTVVFGGGTKLTVL

SEQ ID NO: 959 - protein, 128 aa, Artificial Sequence; identical to SEQ ID NO: 903
  Synthetic Polypeptide

SEQ ID NO: 960 - protein, 106 aa, Artificial Sequence
  Synthetic Polypeptide
SYELTQPPSVSVALGQTARITCGGNNIGGKNVHWYQQKPGQAPVLVIYRDSNRPSGIPERFSGSKSGNTATLTISRAQAGDESDYYCQVWDSSTVVFGGGTQLTVL

SEQ ID NO: 961 - protein, 128 aa, Artificial Sequence; identical to SEQ ID NO: 921
  Synthetic Polypeptide

SEQ ID NO: 962 - protein, 106 aa, Artificial Sequence
  Synthetic Polypeptide
SYELTQPLSVSVALGQTARITCGGNNIGSKNVHWYQQKPGQAPVLVIYRNSNRPSGIPERFSGSNSGNTATLTISRAQAGDEADYYCQVWDSSTVVFGGGTKLTVL

SEQ ID NO: 963 - protein, 128 aa, Artificial Sequence
  Synthetic Polypeptide
QVQLVESGGGLVKPGGSLRLSCAASGFNFSRNGMHWVRQVPGRGLDWVAVISNDGSNKYYADSVKGRFTISRDNSKNTLYLQMNSLRAEDTAVYYCAKVYYGSGIYYKNNYYYGMDVWGQGTTVTVSS

SEQ ID NO: 964 - protein, 106 aa, Artificial Sequence
  Synthetic Polypeptide
SYELTQPPSVSVALGQTARISCGGNNIESKNVHWYQQKPGQAPVLVIYRDSNRPSGIPERFSGSKSGTTATLTISRAQAGDEAEYYCQVWDSSTVVFGGGTQLTVL

SEQ ID NO: 965 - protein, 115 aa, Artificial Sequence
  Synthetic Polypeptide
EVQLVESGGGLVKPGGSLRLSCAASGFTFSNARMGWVRQAPGKGLEWVGRIKSKTEGGTRDYAAPVKGRFTISRDDSKNTLYLQMNSLKTEDTAVYYCTSYSGVWGQGTMVTVSS

SEQ ID NO: 966 - protein, 114 aa, Artificial Sequence
  Synthetic Polypeptide
DIVMTQSPDSLAVSLGERATINCKSSQSVLYSSNNRNYLAWYHQKPGQSPKLLISWASTRESGVPDRFSGSGSGTDFTLTINSLQAEDVAVYYCQQYYSIPITFGGGTKVEIKR

SEQ ID NO: 967 - protein, 128 aa, Artificial Sequence
  Synthetic Polypeptide
QVQLVESGGGVVQPGRSLRLSCAASGFTFSNYGFHWVRQTPGKGLEWVAVISYDGSNRYYASSVKGRFTISRDNSKNTLYLQMNSLRGEDTALYYCARVYYGSGTYYKNRYYYGMDVWGQGTTVTVSS

SEQ ID NO: 968 - protein, 107 aa, Artificial Sequence
  Synthetic Polypeptide
SYELTQPPSVSVALGQTARITCGGHNIGSKGVHWYQQKPGQAPVLVIYRAANRPSGIPERFSGSNSGNTATLTISGTQAGDEADYYCQAFDAGTVVFGGGTQLTVLG

SEQ ID NO: 969 - protein, 128 aa, Artificial Sequence
  Synthetic Polypeptide
QVQLVESGGGVVQPGRSLRLSCAASGFTFSNYGFHWVRQTPGKGLEWVAVISYAGSNRYYAASVKGRFTISRDNSKNTLYLQMNSLRGEDTALYYCARVYYGSGTYYKNRYYYGMDVWGQGTTVTVSS

SEQ ID NO: 970 - protein, 107 aa, Artificial Sequence
  Synthetic Polypeptide
SYELTQPPSVSVALGQTARITCGGHNIGSKGVHWYQQKPGQAPVLVIYRQSNRPSGIPERFSGSNSGNTATLTISGTQAEDEADYYCQAFDAGTVVFGGGTQLTVLG

SEQ ID NO: 971 - protein, 128 aa, Artificial Sequence
  Synthetic Polypeptide
QVQLVESGGGVVQPGRSLRLSCAASGFTFSNYGFHWVRQTPGKGLEWVAVISYSGSNRYYADSVKGRFTISRDNSKNTLYLQMNSLRGEDTALYYCARVYYGSGTYYKNRYYYGMDVWGQGTTVTVSS

SEQ ID NO: 972 - protein, 107 aa, Artificial Sequence
  Synthetic Polypeptide
SYELTQPPSVSVALGQTARITCGGHNIGSKGVHWYQQKPGQAPVLVIYRQSNRPSGIPERFSGSNSGNTATLTISGTQAGDEADYYCQAFDAGTVVFGGGTQLTVLG

SEQ ID NO: 973 - protein, 107 aa, Artificial Sequence
  Synthetic Polypeptide
SYELTQPLSVSVALGQTARITCGGHNIGSKGVHWYQQKPGQAPVLVIYRNSNRPSGIPERFSGSNSGNTATLTISRAQAGDEADYYCQVWDISTVVFGGGTELTVLG

SEQ ID NO: 974 - protein, 128 aa, Artificial Sequence
  Synthetic Polypeptide
QVQLVESGGGVAQPGRSLRLSCAASGFNFSNCGMHWVRQAPGKGLEWVAVISYDGGNKYHADSVKGRFTISRDDSKNTLYLQMDSLRTEDTAVYYCAKVYYGSGIYYKNRYYYGMDVWGQGTTVTVSS

SEQ ID NO: 975 - protein, 107 aa, Artificial Sequence
  Synthetic Polypeptide
SYELTQPLSVSVALGQTARITCGGHNIGSKGVHWYQQKPGQAPVLVIYRNSNRPSGIPERFSGSNSGKTATLTISRAQAGDEADYYCQVWDSSTVVFGGGTELTVLG

SEQ ID NO: 976 - protein, 128 aa, Artificial Sequence
  Synthetic Polypeptide
QVQLVESGGGVAQPGRSLRLSCAASGFNFSNCGMHWVRQAPGKGLEWVAVISYDGGNKYYADSVKGRFTISRDDSKNTLYLQMDSLRTEDTAVYYCAKVYYGSGIYYKNRYYYGMDVWGQGTTVTVSS

SEQ ID NO: 977 - protein, 107 aa, Artificial Sequence
  Synthetic Polypeptide
SYELTQPLSVSVALGQTARITCGGNNIGSKNVHWYQKRPGQAPVLVIYRDSNRPSGIPERFSGSKSGNTATLTISRAQAGDEADYYCQVWDSNTVVFGGGTNLTVLG

SEQ ID NO: 978 - protein, 128 aa, Artificial Sequence
  Synthetic Polypeptide
QVQLVESGGGVVQPGRSLRLSCVVSGFNFSNNGMHWVRQAPGKGLEWVAVISNDGSNKYYADSVRGRFTISRDNSKNTLYLQMNSLRAEDTAVYSCAKVYYGSGIYYKNNYYYGMDVWGQGTTVTVSS

SEQ ID NO: 979 - protein, 107 aa, Artificial Sequence
  Synthetic Polypeptide
SYELTQPLSVSVALGQTARITCGGNNIGSKNVHWYQQKAGQAPVQVIYRNSNRPSGIPERFSGSNSGNTATLTISRAQAGDEADYYCQVWDSSTVVFGGGTKLTVLG

SEQ ID NO: 980 - protein, 128 aa, Artificial Sequence
  Synthetic Polypeptide
QVQLVESGGGVVQPGRSLRLSCAASGFNFNTYGMHWVRQAPGKGLEWVAVISYDGSNKYYADSVKGRFTISRDNSKSTLYLQMNSLRAEDTAVYYCARVYYGSGSYYKKNYYYGMDVWGQGTTVTVSS

SEQ ID NO: 981 - protein, 107 aa, Artificial Sequence
  Synthetic Polypeptide
SYELTQPLSVSVALGQTARITCGGNNIGGKNVHWYQQKPGQAPVLVIYRDSNRPSGIPERFSGSKSGNTATLTISRAQAGDESDYYCQVWDSSTVVFGGGTTLTVLG

SEQ ID NO: 982 - protein, 128 aa, Artificial Sequence
  Synthetic Polypeptide
QVQVVESGGGVVQPGRSLRLSCAASGFTLSSYGFHWVRQTPGKGLEWVAVISYDGSNKYYADSVKGRFTISRDNSKNTLYLQMNSLRGEDTAVYYCARVYYGSGTYYKNRYYYGMDVWGQGTTVTVSS

SEQ ID NO: 983 - protein, 107 aa, Artificial Sequence
  Synthetic Polypeptide
SYELTQPLSVSEALGQTARITCGGNNIGSKNVHWYQQKPGQAPVLVIYRDSNRPSGIPERFSGSKSGNTATLTISRAQAGDEADYYCQVWDSSTVVFGGGTKVTVLG

SEQ ID NO: 984 - protein, 128 aa, Artificial Sequence
  Synthetic Polypeptide
QVQLVESGGGVVQPGRSLRLSCVVSGFNFINNGMHWVRQAPGKGLDWVAVISNDGSNKYYPDSVKGRFTISRDNSKNTLYLQMNSLRAEDSAVYYCAKVYYGSGNYYKNNYYYGMDVWGQGTTVTVSS

SEQ ID NO: 985 - protein, 107 aa, Artificial Sequence
  Synthetic Polypeptide
SYELTQPLSVSVALGQTARITCEGNNIGSQNVHWYQQKPGQAPVLVMYRDSNRPSGIPERFSGSKSGNTATLAISRAQAGDESDYYCQVWDGSAVVFGGGTTLTVLG

SEQ ID NO: 986 - protein, 128 aa, Artificial Sequence
  Synthetic Polypeptide
QMQVVESGGGVVQPGRSLRLSCAASGFTFSSSGMHWVRQAPGKGLEWVAVISHDGSNKYYADSVKGRFTISRDNSKNTLYLQMNSLGGEDTAVYYCAKVYYGSGIYYKNRYYYGMDVWGQGTTVIVSS

SEQ ID NO: 987 - protein, 107 aa, Artificial Sequence
  Synthetic Polypeptide
SYELTQPLSVSVALGQTARITCGGHNIGSKGVHWYQQKPGQAPVLVIYRNSNRPSGIPERFSGSNSGNTATLTISRAQAGDEADYYCQVWDSSTVVFGGGTELTVLG

SEQ ID NO: 988 - protein, 128 aa, Artificial Sequence
  Synthetic Polypeptide
QVQLVESGGGVAQPGRSLRLSCAASGFNFSDCGMHWVRQAPGKGLEWVAVISYDGGNKYYADSVKGRFTISRDDSKNTLYLQTDSLRTEDTAVYYCAKVYYGSGIYYKNRYYYGMDVWGQGTTVTVSS

SEQ ID NO: 989 - protein, 107 aa, Artificial Sequence
  Synthetic Polypeptide
SYELTQPLSVSVALGQTGRITCGGNNIGSKNVHWYQQKPGQAPVLVIYRSSNRPSGIPERFSGSNSGNTATLTISRAQAGDESDYYCQIWDSSTVVFGGGTKLTVLG

SEQ ID NO: 990 - protein, 128 aa, Artificial Sequence
  Synthetic Polypeptide
QVQVVESGGGVVQPGRSLRLSCAASGFTFSSYGMHWVRQAPGKGLEWVAVISFDGNNKYYADSVKGRFTISRDNSKNTLYLQMNSLRGEDTAVYYCARVYYGSGSYYKNRYYYGMDVWGQGTTVTVST

SEQ ID NO: 991 - protein, 107 aa, Artificial Sequence
  Synthetic Polypeptide
SYELTQPLSVSVALGQTARITCGGNNIGSKNVHWYQQRPGQAPVLVIYRDSNRPSGIPERLSGSKAGNTATLTISRAHAGDEADYYCQVWDSSTVVFGGGTELTVQG

SEQ ID NO: 992 - protein, 128 aa, Artificial Sequence
  Synthetic Polypeptide
QVQLVESGGGVVQPGRSLRLSCAVSGFTFSSNGMHWVRQAPGKGLEWVAVISNDGSNKYYGDSVKGRFTISRDNSKNTLYLQMNSLRAEDTAVYYCAKVYYGSGIYYRNNYYYGMDVWGQGTTVTVSS

SEQ ID NO: 993 - protein, 107 aa, Artificial Sequence
  Synthetic Polypeptide
SYELTQPLSVSVALGQTARITCGGNNIGSKNVHWYQQKPGQAPILVIYRNTNRPSGIPERFSGSNSGNTATLTISRAQVGDESDYFCQVWDSSTVVFGGGTKLTVLG

SEQ ID NO: 994 - protein, 128 aa, Artificial Sequence
  Synthetic Polypeptide
QVQVVESGGGVVQPGRSLRLSCGASGFTFSGYGMHWVRQAPGKGLEWVAVISYDGSNKYYADSVKGRFPISRDNSKNTLYLQMNSLRGEDTAVYYCARVYYGSGIYYKNRYYYGMDVWGQGTTVAVSS

SEQ ID NO: 995 - protein, 107 aa, Artificial Sequence; identical to SEQ ID NO: 993
  Synthetic Polypeptide

SEQ ID NO: 996 - protein, 128 aa, Artificial Sequence
  Synthetic Polypeptide
QVQVVESGGGVVQPGRSLRLSCGASGFTFSGYGMHWVRQAPGKGLEWVAVISYDGSNKYYADSVKGRFTISRDNSKNTLYLQMNSLRGEDTAVYYCARVYYGSGIYYKNRYYYGMDVWGQGTTVAVSS

SEQ ID NO: 997 - protein, 107 aa, Artificial Sequence
  Synthetic Polypeptide
SYDLTQPLSVSVALGQTARITCGGNNIGDKNVHWYQQKPGQAPVLVIYRNNVRPSGIPERFSGSNSGNTATLTISRAQAGDEADYYCQVWDSSTVVFGGGTKLTVLG

SEQ ID NO: 998 - protein, 128 aa, Artificial Sequence
  Synthetic Polypeptide
QVQLVESGGGVVQPGRSLRLSCAASGLNFSNFGMHWVRQAPGKGLDWVAVISYDGGNKYYADSVKGRFTVSRDNSKNTLFLQMNSLRAEDTALYYCAKVYYGSGSYYKKRYYYGMDVWGQGTTVTVSS

SEQ ID NO: 999 - protein, 107 aa, Artificial Sequence
  Synthetic Polypeptide
SYELTQPLSVSVALGQTARITCGGNNIGSKNVHWYQQKPGQAPVLVIYRDSNRPSGIPERFSGSKSGNTATLTISRAQAGDEADYYCQVWDSSTVVFGGGAKLTVLG

SEQ ID NO: 1000 - protein, 128 aa, Artificial Sequence
  Synthetic Polypeptide
QVQLVESGGGVVQPGRSLRLSCAASGFNFSSCGMHWVRQAPGKGLEWVAVISYDGTNKYYADSVKGRFTISRDNSKNTLYLQMNSLRAEDTAVYYCAKVYYGSGIYYKKNYYYGMDVWGQGTTVTVSS

SEQ ID NO: 1001 - protein, 115 aa, Artificial Sequence; identical to SEQ ID NO: 965
  Synthetic Polypeptide

SEQ ID NO: 1002 - protein, 114 aa, Artificial Sequence
  Synthetic Polypeptide
DIVMTQSPDSLAVSLGERATINCKSSQSVLYSSNNKNYLAWYHQKPGQSPKLLISWASTRESGVPDRFSGSGSGTDFTLTINSLQAEDVAVYYCQQYYSIPITFGGGTKVEIKR

SEQ ID NO: 1003 - protein, 330 aa, Artificial Sequence
  Synthetic Polypeptide
ASTKGPSVFPLAPSSKSTSGGTAALGCLVKDYFPEPVTVSWNSGALTSGVHTFPAVLQSSGLYSLSSVVTVPSSSLGTQTYICNVNHKPSNTKVDKKVEPKSCDKTHTCPPCPAPELLGGPSVFLFPPKPKDTLMISRTPEVTCVVVDVSHEDPEVKFNWYVDGVEVHNAKTKPREEQYNSTYRVVSVLTVLHQDWLNGKEYKCKVSNKALPAPIEKTISKAKGQPREPQVYTLPPSREEMTKNQVSLTCLVKGFYPSDIAVEWESNGQPENNYKTTPPVLDSDGSFFLYSKLTVDKSRWQQGNVFSCSVMHEALHNHYTQKSLSLSPGK

SEQ ID NO: 1004 - protein, 106 aa, Artificial Sequence
  Synthetic Polypeptide
TVAAPSVFIFPPSDEQLKSGTASVVCLLNNFYPREAKVQWKVDNALQSGNSQESVTEQDSKDSTYSLSSTLTLSKADYEKHKVYACEVTHQGLSSPVTKSFNRGEC

SEQ ID NO: 1005 - protein, 330 aa, Artificial Sequence; identical to SEQ ID NO: 1003
  Synthetic Polypeptide

SEQ ID NO: 1006 - protein, 105 aa, Artificial Sequence
  Synthetic Polypeptide
QPKAAPSVTLFPPSSEELQANKATLVCLISDFYPGAVTVAWKADSSPVKAGVETTTPSKQSNNKYAASSYLSLTPEQWKSHRSYSCQVTHEGSTVEKTVAPTECS

SEQ ID NO: 1007 - protein, 330 aa, Artificial Sequence; identical to SEQ ID NO: 1003
  Synthetic Polypeptide

SEQ ID NO: 1008 - protein, 105 aa, Artificial Sequence; identical to SEQ ID NO: 1006
  Synthetic Polypeptide

SEQ ID NO: 1009 - protein, 330 aa, Artificial Sequence; identical to SEQ ID NO: 1003
  Synthetic Polypeptide

SEQ ID NO: 1010 - protein, 105 aa, Artificial Sequence; identical to SEQ ID NO: 1006
  Synthetic Polypeptide

SEQ ID NO: 1011 - protein, 105 aa, Artificial Sequence; identical to SEQ ID NO: 1006
  Synthetic Polypeptide

SEQ ID NO: 1012 - protein, 330 aa, Artificial Sequence; identical to SEQ ID NO: 1003
  Synthetic Polypeptide

SEQ ID NO: 1013 - protein, 105 aa, Artificial Sequence; identical to SEQ ID NO: 1006
  Synthetic Polypeptide

SEQ ID NO: 1014 - protein, 330 aa, Artificial Sequence; identical to SEQ ID NO: 1003
  Synthetic Polypeptide

SEQ ID NO: 1015 - protein, 105 aa, Artificial Sequence; identical to SEQ ID NO: 1006
  Synthetic Polypeptide

SEQ ID NO: 1016 - protein, 330 aa, Artificial Sequence; identical to SEQ ID NO: 1003
  Synthetic Polypeptide

SEQ ID NO: 1017 - protein, 105 aa, Artificial Sequence; identical to SEQ ID NO: 1006
  Synthetic Polypeptide

SEQ ID NO: 1018 - protein, 330 aa, Artificial Sequence; identical to SEQ ID NO: 1003
  Synthetic Polypeptide

SEQ ID NO: 1019 - protein, 105 aa, Artificial Sequence; identical to SEQ ID NO: 1006
  Synthetic Polypeptide

SEQ ID NO: 1020 - protein, 330 aa, Artificial Sequence; identical to SEQ ID NO: 1003
  Synthetic Polypeptide

SEQ ID NO: 1021 - protein, 105 aa, Artificial Sequence; identical to SEQ ID NO: 1006
  Synthetic Polypeptide

SEQ ID NO: 1022 - protein, 330 aa, Artificial Sequence; identical to SEQ ID NO: 1003
  Synthetic Polypeptide

SEQ ID NO: 1023 - protein, 105 aa, Artificial Sequence; identical to SEQ ID NO: 1006
  Synthetic Polypeptide

SEQ ID NO: 1024 - protein, 330 aa, Artificial Sequence; identical to SEQ ID NO: 1003
  Synthetic Polypeptide

SEQ ID NO: 1025 - protein, 105 aa, Artificial Sequence; identical to SEQ ID NO: 1006
  Synthetic Polypeptide

SEQ ID NO: 1026 - protein, 330 aa, Artificial Sequence; identical to SEQ ID NO: 1003
  Synthetic Polypeptide

SEQ ID NO: 1027 - protein, 105 aa, Artificial Sequence; identical to SEQ ID NO: 1006
  Synthetic Polypeptide

SEQ ID NO: 1028 - protein, 330 aa, Artificial Sequence; identical to SEQ ID NO: 1003
  Synthetic Polypeptide

SEQ ID NO: 1029 - protein, 105 aa, Artificial Sequence; identical to SEQ ID NO: 1006
  Synthetic Polypeptide

SEQ ID NO: 1030 - protein, 330 aa, Artificial Sequence; identical to SEQ ID NO: 1003
  Synthetic Polypeptide

SEQ ID NO: 1031 - protein, 105 aa, Artificial Sequence; identical to SEQ ID NO: 1006
  Synthetic Polypeptide

SEQ ID NO: 1032 - protein, 330 aa, Artificial Sequence; identical to SEQ ID NO: 1003
  Synthetic Polypeptide

SEQ ID NO: 1033 - protein, 105 aa, Artificial Sequence; identical to SEQ ID NO: 1006
  Synthetic Polypeptide

SEQ ID NO: 1034 - protein, 330 aa, Artificial Sequence; identical to SEQ ID NO: 1003
  Synthetic Polypeptide

SEQ ID NO: 1035 - protein, 105 aa, Artificial Sequence; identical to SEQ ID NO: 1006
  Synthetic Polypeptide

SEQ ID NO: 1036 - protein, 330 aa, Artificial Sequence; identical to SEQ ID NO: 1003
  Synthetic Polypeptide

SEQ ID NO: 1037 - protein, 105 aa, Artificial Sequence; identical to SEQ ID NO: 1006
  Synthetic Polypeptide

SEQ ID NO: 1038 - protein, 330 aa, Artificial Sequence; identical to SEQ ID NO: 1003
  Synthetic Polypeptide

SEQ ID NO: 1039 - protein, 330 aa, Artificial Sequence; identical to SEQ ID NO: 1003
  Synthetic Polypeptide

SEQ ID NO: 1040 - protein, 106 aa, Artificial Sequence; identical to SEQ ID NO: 1004
  Synthetic Polypeptide

SEQ ID NO: 1041 - protein, 249 aa, Artificial Sequence
  Synthetic Polypeptide
QVQLVESGGGVVQPGRSLRLSCVVSGFNFSNNGMHWVRQAPGKGLEWVAVISNDGSNKYYADSVKGRFTISRDNSKNTLYLQMNSLRTEDTAVYYCAKVYYGSGIYYKNRNYYGMDVWGQGTTVTVSSGGGGSGGGGSGGGGSSYELTQPPSVSVALGQTARITCGGNNIGSQNVHWYQQKPGQAPVLVIYRDSNRPSGIPDRFSGSKSGNTATLTISRAQAGDEADYYCQVWDSSTVVFGGGTKLTVL

SEQ ID NO: 1042 - protein, 249 aa, Artificial Sequence
  Synthetic Polypeptide
QVQLVESGGGVVQPGRSLRLSCAASGFNFSNYGMHWVRQAPGKGLEWVAVISYDGSNKYYADSVKGRFTISRDNSKNTLYLQMNSLRAEDTAVYFCARVYYGSGIYYKKRYYYGMDVWGQGTTVTVSSGGGGSGGGGSGGGGSSYELTQPPSVSVALGQTARITCGGHNIGSKGVHWYQQKPGQAPVLVIYRNSNRPSGIPERFSGSNSGNTATLTITRAQAGDEADYYCQVWDSSTVVFGGGTKLTVL

SEQ ID NO: 1043 - protein, 249 aa, Artificial Sequence
  Synthetic Polypeptide
QVQLVESGGGVVQPGRSLRLSCAPSGFNFSNYGMHWVRQAPGKGLEWVAVISYDGSNKYYADSVKGRFTISRDNSKNTLFLQMNSLRAEDTAVYFCARVYYGSGSYYKKRYYYGMDVWGQGTTVTVSSGGGGSGGGGSGGGGSSYELTQPPSVSVALGQTARITCGGNNIGSQNVHWYQQKPGQAPVLVIYRDSNRPSGIPERFSGSKSGNTATLTISRAQAGDEADYYCQVWDSSTVVFGGGTQLTVL

SEQ ID NO: 1044 - protein, 249 aa, Artificial Sequence
  Synthetic Polypeptide
QVQLVESGGGVVQPGRSLRLSCAASGFTFSSSGMHWVRQAPGKGLEWVAVISYDGTNKYYADSVKGRFTISRDNSKNTLYLQMNSLRAEDTAVYYCAKVYYGSGIYYKNRYYYGMDVWGQGTTVTVSSGGGGSGGGGSGGGGSSYELTQPPSVSVALGQTARITCGGHNIGSKGVHWYQQKPGQAPVLVIYRNSNRPSGIPERFSGSNSGNTATLTISRAQAGDEADYYCQVWDSSTVVFGGGTQLTVL

SEQ ID NO: 1045 - protein, 249 aa, Artificial Sequence
  Synthetic Polypeptide
QVQLVESGGGVVQPGRSLRLSCAVSGFNFSNYGMHWVRQVPGRGLDWVAVISNDGSNKYYADSVKGRFTISRDNSKNTLYLQMDSLRTEDTAVYYCAKVYYGSGIYYKKRYYYGMDVWGQGTTVTVSSGGGGSGGGGSGGGGSSYELTQPPSVSVALGQTARITCGGHNIGSQNVHWYQQKPGQAPVLVIYRDSNRPSGIPERFSGSKSGNTATLTISRAQAGDEADYYCQVWDSSTVVFGGGTQLTVL

SEQ ID NO: 1046 - protein, 249 aa, Artificial Sequence
  Synthetic Polypeptide
QVQLVESGGGVVQPGRSLRLSCAASGFNFSNYGMHWVRQAPGKGLEWVAVISYDGSNKYYADSVKGRFTISRDNSKNTLYLQMNSLRAEDTAVYFCARVYYGSGIYYKKRYYYGMDVWGQGTTVTVSSGGGGSGGGGSGGGGSSYELTQPPSVSVAPGQTARITCGGNNIGSKNVHWYQQKAGQAPVQVIYRNSNRPSGIPARFSGSNSGNTATLTISRAQAGDEADYYCQVWDSSTVVFGGGTKLTVL

SEQ ID NO: 1047 - protein, 248 aa, Artificial Sequence
  Synthetic Polypeptide
QVQLVESGGGVVQPGRSLRLSCAASGFTFSSYGMHWVRQAPGKGLEWVAVISYDGSNKYYADSVKGRFTISRDNSKNTLYLQMNSLRGEDTAVYYCARVYYGSGSYYKNRYYYGMDVWGQGTTVTVSSGGGGSGGGGSGGGGSSYELTQPPSVSVAPGQTARIPCGGNNIGSKNVHWYQQKPGQAPVLVIYRDINRPSGIPERFSGSNSGNTATLTISRAQAGDEADYYCQVWDSSVVFGGGTKLTVL

SEQ ID NO: 1048 - protein, 249 aa, Artificial Sequence
  Synthetic Polypeptide
QVQLVESGGGVVQPGRSLRLSCAASGFNFSNYGMHWVRQAPGKGLEWVAVISYDGSNKYYADSVKGRFTISRDNSKNTLYLQMNSLRAEDTAVYFCARVYYGSGIYYKKRYYYGMDVWGQGTTVTVSSGGGGSGGGGSGGGGSSYELTQPPSVSVALGQTARLTCEGNNIGSKNVHWYQQKPGQAPVLVIYRNSNRPSGIPERFSGSNSGNTATLTISRVQAGDEADYYCQAWDSSTVVFGGGTQLTVL

SEQ ID NO: 1049 - protein, 251 aa, Artificial Sequence
  Synthetic Polypeptide
QVQLVESGGGLVKPGGSLRLSCAVSGFNFSNNGMHWVRQAPGKGLEWVAVISYDGSNKYYTDSVKGRFTISRDNSKNTLYLQMNSLRTEDTAVYYCAKVYYGSGIYYKKRYYYGMDVWGQGTTVTVSSGGGGSGGGGSGGGGSSYELTQPLSVSEALGQTARITCGGNNIGSKNVHWYQQKPGQAPVLVIYRDSNRPSGIPERFSGSNSGNAATLTISRVEAGDEADYYCQVWDSSSDHVVFGGGTQLTVL

SEQ ID NO: 1050 - protein, 249 aa, Artificial Sequence
  Synthetic Polypeptide
QVQLVESGGGVVQPGRSLRLSCAASGFNFSNYGMHWVRQAPGKGLEWVAVISYDGSNKYYADSVKGRFTISRDNSKNTLYLQMNSLRAEDTAVYFCARVYYGSGIYYKKRYYYGMDVWGQGTTVTVSSGGGGSGGGGSGGGGSSYELTQPPSVSVAPGQTARITCGGNNIGSKNVHWYQQKPGQAPVLVIYRNSNRPSGIPERFSGSNSGNTATLTISGTQAMDEADYYCQAWDSSNVVFGGGTQLTVL

SEQ ID NO: 1051 - protein, 249 aa, Artificial Sequence
  Synthetic Polypeptide
QVQLVESGGGVVQPGRSLRLSCVVSGFNFSRNGMHWVRQVPGRGLDWVAVISNDGSNKYYADSVKGRFTISRDNSKNTLYLQMNSLRAEDTAVYYCAKVYYGSGIYYKNNYYYGMDVWGQGTTVTVSSGGGGSGGGGSGGGGSSYELTQPLSVSVALGQTARITCGGNNIGSQNVHWYQQKPGQAPVLVIYRDSNRPSGIPDRFSGSKSGNTATLTISRAQAGDEADYYCQVWDSSTVVFGGGTQLTVL

SEQ ID NO: 1052 - protein, 249 aa, Artificial Sequence
  Synthetic Polypeptide
QVQLVESGGGVVQPGRSLRLSCVVSGFNFSRNGMHWVRQVPGRGLDWVAVISNDGSNKYYADSVKGRFTISRDNSKNTLYLQMNSLRAEDTAVYYCAKVYYGSGIYYKNRYYYGMDVWGQGTTVTVSSGGGGSGGGGSGGGGSSYELTQPPSVSVAPGQTARITCGGNNIGSKNVHWYQQKPGQAPVLVIYRDSNRPSGIPERFSGSKSGTTATLTISRAQAGDEAEYYCQVWDSSTVVFGGGTELTVL

SEQ ID NO: 1053 - protein, 249 aa, Artificial Sequence
  Synthetic Polypeptide
QVQLVESGGGVVQPGRSLRLSCAASGFNFSNYGMHWVRQAPGKGLEWVAVISYDGSNKYYADSVKGRFTISRDNSKNTLYLQMNSLRAEDTAVYFCARVYYGSGIYYKKRYYYGMDVWGQGTTVTVSSGGGGSGGGGSGGGGSSYELTQPLSVSVALGQTARITCGGNNIGSKNVHWYQQKPGQAPVLAIYRNSNRPSGIPERFTGSNSGNTATLTISRAQAGDESDYYCQIWDSSTVVFGGGTKLTVL

SEQ ID NO: 1054 - protein, 249 aa, Artificial Sequence
  Synthetic Polypeptide
QVQLVESGGGVVQPGRSLRLSCAASGFNFSRNGMHWVRQVPGRGLDWVAVISNDGSNKYYADSVKGRFTISRDNSKNTLYLQMNSLRAEDTAVYYCAKVYYGSGIYYKKNYYYGMDVWGQGTTVTVSSGGGGSGGGGSGGGGSSYELTQPPSVSVALGQTARISCGGNNIGSKNVHWYQQKPGQAPVLVIYRDSNRPSGIPERFSGSKSGTTATLTISRAQAGDEAEYYCQVWDSSTVVFGGGTQLTVL

SEQ ID NO: 1055 - protein, 249 aa, Artificial Sequence
  Synthetic Polypeptide
QVQLVESGGGVVQPGRSLRLSCAVSGFNFSNNGMHWVRQAPGKGLEWVAVISYDGSNKYYTDSVKGRFTISRDNSKNTLYLQMNSLRTEDTAVYYCAKVYYGSGIYYKKRYYYGMDVWGQGTTVTVSSGGGGSGGGGSGGGGSSYELTQPPSVSVALGQTARITCEGNNIGSQNVHWYQQKPGQAPVLVMYRDSNRPSGIPERFSGSKSGNTATLAISRAQAGDESDYYCQVWDGSAVVFGGGTKLTVL

SEQ ID NO: 1056 - protein, 249 aa, Artificial Sequence
  Synthetic Polypeptide
QVQLVESGGGVVQPGRSLRLSCAASGFTFSSYGMHWVRQAPGKGLEWVAVISYDGSNKYYADSVKGRFTISRDNSKNTLYLQMNSLRAEDTAVYFCARVYYGSGIYYKKRYYYGMDVWGQGTTVTVSSGGGGSGGGGSGGGGSSYELTQPLSVSVALGQTARITCEGNNIGSQNVHWYQQKPGQAPVLVMYRDSNRPSGIPERFSGSKSGNTATLAISRAQAGDESDYYCQVWDGSAVVFGGGTQLTVL

SEQ ID NO: 1057 - protein, 249 aa, Artificial Sequence
  Synthetic Polypeptide
QVQLVESGGGVVQPGRSLRLSCAASGFTFSNYGFHWVRQTPGKGLEWVAVISYDGSNRYYADSVKGRFTISRDNSKNTLYLQMNSLRGEDTALYYCARVYYGSGTYYKNRYYYGMDVWGQGTTVTVSSGGGGSGGGGSGGGGSSYELTQPPSVSVALGQTARITCGGHNIGSKGVHWYQQKPGQAPVLVIYRNSNRPSGIPERFSGSNSGNTATLTISGTQAMDEADYYCQAWDSGTVVFGGGTQLTVL

SEQ ID NO: 1058 - protein, 251 aa, Artificial Sequence
  Synthetic Polypeptide
QVQLVESGGGVVQPGRSLRLSCAASGFTFSNYGFHWVRQTPGKGLEWVAVISYDGSNRYYADSVKGRFTISRDNSKNTLYLQMNSLRGEDTALYYCARVYYGSGTYYKNRYYYGMDVWGQGTTVTVSSGGGGSGGGGSGGGGSSYELTQPPSVSVALGQTARITCGANNIGSKNVHWYQQKPGQPPVLVIYRDFNRPSGIPERFSASNSGNTATLTISRGQAGDEADYYCQVWDSSTGNVVFGGGTKLTVL

SEQ ID NO: 1059 - protein, 249 aa, Artificial Sequence
  Synthetic Polypeptide
QVQLVESGGGVVQPGRSLRLSCAASGFIFSNYGFHWVRQTPGKGLEWVAVISYDGSNKYYADSVKGRFTISRDNSKNTLYLQMNSLRGEDTAVYYCARVYYGSGSYYKNRYYYGMDVWGQGTTVTVSSGGGGSGGGGSGGGGSSYELTQPPSVSVAPGQTARITCGGNNIGSKNVHWYQQKPGQAPVLVIYRDSNRPSGIPERFSGSKSGTTATLTISRAQAGDEADYYCQVWDSSTVVFGGGTELTVL

SEQ ID NO: 1060 - protein, 251 aa, Artificial Sequence
  Synthetic Polypeptide
QVQLVESGGGVVQPGRSLRLSCAASGFNFSNYGMHWVRQAPGKGLEWVAVISYDGSNKYYADSVKGRFTISRDNSKNTLYLQMNSLRAEDTAVYFCARVYYGSGIYYKKRYYYGMDVWGQGTTVTVSSGGGGSGGGGSGGGGSSYELTQSSSVSVAPGQTARITCGGNNIGSKNVHWYQQKPGQAPVLVIYRDSNRPSGIPERFSGSKSGTTATLTISRVEAGDEADYYCQVWDSSSAHVIFGGGTKLTVL

SEQ ID NO: 1061 - protein, 249 aa, Artificial Sequence
  Synthetic Polypeptide
QVQLVESGGGVVQPGRSLRLSCGASGFTFSGYGMHWVRQAPGKGLEWVAVISYDGSNKYYADSVKGRFTISRDNSKNTLYLQMNSLRGEDTAVYYCARVYYGSGIYYKNRYYYGMDVWGQGTTVTVSSGGGGSGGGGSGGGGSSYELTQPPSGSVALGQTARITCGGNNLGSKNVHWYQQKPGQAPVLVIYRNSNRPSGIPERFSGSNSGNTATLTISRAQAGDEADYYCQVWDSSTVVFGGGTKLTVL

SEQ ID NO: 1062 - protein, 249 aa, Artificial Sequence
  Synthetic Polypeptide
QVQLVESGGGLVKPGGSLRLSCAASGFTFSNNGMHWVRQAPGKGLEWVAVISYDGSNKYYADSVKGRFTISRDNSKNTLYLQMNSLRAEDTAVYYCAKVYYGSGIYYKNRYYYGMDVWGQGTTVTVSSGGGGSGGGGSGGGGSSYELTQPPSVSVALGQTARITCGGNRIGSKNVHWYQQKPGQAPVLVIYRDSNRPSGIPERFSGSKSGTTATLTISRAQAGDEAEYYCQVWDSSTVVFGGGTKLTVL

SEQ ID NO: 1063 - protein, 249 aa, Artificial Sequence
  Synthetic Polypeptide
QVQLVESGGGVVQPGRSLRLSCAASGFTFSNYGFHWVRQTPGKGLEWVAVISYDGSNRYYADSVKGRFTISRDNSKNTLYLQMNSLRGEDTALYYCARVYYGSGTYYKNRYYYGMDVWGQGTTVTVSSGGGGSGGGGSGGGGSSYELTQLPSVSVALGQTARITCGGHNIGSKGVHWYQQKPGQAPVLVIYRNSNRPSGIPERFSGSNSGNTATLTISRAQAGDEADYYCQVWDSSTVVFGGGTELTVL

SEQ ID NO: 1064 - protein, 249 aa, Artificial Sequence
  Synthetic Polypeptide
QVQLVESGGGVVQPGRSLRLSCAASGFNFSNYGMHWVRQAPGKGLEWVAVISYDGSNKYYADSVKGRFTISRDNSKNTLYLQMNSLRAEDTAVYFCARVYYGSGIYYKNRYYYGMDVWGQGTTVTVSSGGGGSGGGGSGGGGSSYELTQPPSVSVALGQTARITCGGHNIGSKGVHWYQQKPGQAPVLVIYRNSNRPSGIPERFSGSNSGNTATLTISRAQAGDEADYYCQVWDSSTVVFGGGTQLTVL

SEQ ID NO: 1065 - protein, 249 aa, Artificial Sequence
  Synthetic Polypeptide
QVQLVESGGDLVQPGRSLRLSCAASGFTFSNNGMHWVRQAPGKGLEWVAVISNDGSNKYYADSVRGRFTISRDNSKNTLYLQMNSLRAEDTAVYYCAKVYYGSGIYYKNRYYYGMDVWGQGTTVTVSSGGGGSGGGGSGGGGSSYELTQPLSVSVALGQTARITCGGNNIGSKNVHWYQQKPGQAPVLVIYRNSNRPSGIPERFSGSNSGNTATLTLSRVQAGDEADYYCQVWDSSTVVFGGGTKLTVL

SEQ ID NO: 1066 - protein, 249 aa, Artificial Sequence
  Synthetic Polypeptide
QVQLVESGGGVVQPGRSLRLSCAVSGFNFSNNGMHWVRQAPGKGLEWVAVISNDGSNKYYADSVRGRFTISRDNSKNTLYLQMDSLRTEDTAVYYCAKVYYGSGIYYKNRYYYGMDVWGQGTTVTVSSGGGGSGGGGSGGGGSSYELTQPPSVSVALGQTARLTCEGNNIGSKNVHWYQQKPGQAPVLVIYRDSNRPSGIPERFSGSKSGNTATLAISRAQAGDESDYYCQVWDSSAVVFGGGTKLTVL

SEQ ID NO: 1067 - protein, 249 aa, Artificial Sequence
  Synthetic Polypeptide
QVQLVESGGGVVQPGRSLRLSCAASGFTFSSSGMHWVRQAPGKGLEWVAVISNDGSNKYYADSVKGRFTISRDNSKNTLYLQMNSLRAEDTAVYYCAKVYYGSGIYYKNNYYYGMDVWGQGTTVTVSSGGGGSGGGGSGGGGSSYELTQPPSVSVALGQTARITCGGNNIGSKNVHWYQQKPGQAPVLAIYRNSNRPSGIPERFTGSNSGNTATLTISGTQAMDEADYYCQAWDSSTVVFGGGTKLTVL

SEQ ID NO: 1068 - protein, 249 aa, Artificial Sequence
  Synthetic Polypeptide
QVQLVESGGGVVQPGRSLRLSCAASGFNFSNYGMHWVRQAPGKGLEWVAVISYDGSNKYYADSVKGRFTISRDNSKNTLYLQMNSLRAEDTAVYFCARVYYGSGIYYKKRYYYGMDVWGQGTTVTVSSGGGGSGGGGSGGGGSSYELTQPPSVSVALGQTARITCGGNNIGSQNVHWYQQKPGQAPVLVIYRDSNRPSGIPERFSGSKSGNTATLAISRAQAGDESDYYCQVWDSSAVVFGGGTQLTVL

SEQ ID NO: 1069 - protein, 249 aa, Artificial Sequence
  Synthetic Polypeptide
QVQLVESGGGVVQPGRSLRLSCAASGFTLSSSGMHWVRQAPGKGLEWVAVISNDGSNKYYADSVKGRFTISRDDSKNTLYLQMDSLRTEDTAVYYCAKVYYGSGIYYKNRYYYGMDVWGQGTTVTVSSGGGGSGGGGSGGGGSSYELTQPPSVSVALGQTARISCGGNNIGSKNVHWYQQKPGQAPVLVMYRDSNRPSGIPERFSGSNSGNTATLTISGTQAMDEADYYCQAWDSGTVVFGGGTKLTVL

SEQ ID NO: 1070 - protein, 249 aa, Artificial Sequence
  Synthetic Polypeptide
QVQLVESGGGVVQPGRSLRLSCAASGFNFSNYGMHWVRQAPGKGLEWVAVISYDGSNKYYADSVKGRFTISRDNSKNTLYLQMNSLRAEDTAVYFCARVYYGSGIYYKKRYYYGMDVWGQGTTVTVSSGGGGSGGGGSGGGGSSYELTQPPSVSVALGQTARITCGGNNIGGKNVHWYQQKPGQAPVLVIYRDSNRPSGIPERFSGSKSGNTATLTISRAQAGDESDYYCQVWDSSTVVFGGGTQLTVL

SEQ ID NO: 1071 - protein, 249 aa, Artificial Sequence
  Synthetic Polypeptide
QVQLVESGGGVVQPGRSLRLSCVVSGFNFSRNGMHWVRQVPGRGLDWVAVISNDGSNKYYADSVKGRFTISRDNSKNTLYLQMNSLRAEDTAVYYCAKVYYGSGIYYKNNYYYGMDVWGQGTTVTVSSGGGGSGGGGSGGGGSSYELTQPLSVSVALGQTARITCGGNNIGSKNVHWYQQKPGQAPVLVIYRNSNRPSGIPERFSGSNSGNTATLTISRAQAGDEADYYCQVWDSSTVVFGGGTKLTVL

SEQ ID NO: 1072 - protein, 249 aa, Artificial Sequence
  Synthetic Polypeptide
QVQLVESGGGLVKPGGSLRLSCAASGFNFSRNGMHWVRQVPGRGLDWVAVISNDGSNKYYADSVKGRFTISRDNSKNTLYLQMNSLRAEDTAVYYCAKVYYGSGIYYKNNYYYGMDVWGQGTTVTVSSGGGGSGGGGSGGGGSSYELTQPPSVSVALGQTARISCGGNNIESKNVHWYQQKPGQAPVLVIYRDSNRPSGIPERFSGSKSGTTATLTISRAQAGDEAEYYCQVWDSSTVVFGGGTQLTVL

SEQ ID NO: 1073 - protein, 445 aa, Artificial Sequence
  Synthetic Polypeptide
EVQLVESGGGLVKPGGSLRLSCAASGFTFSNARMGWVRQAPGKGLEWVGRIKSKTEGGTRDYAAPVKGRFTISRDDSKNTLYLQMNSLKTEDTAVYYCTSYSGVWGQGTMVTVSSASTKGPSVFPLAPSSKSTSGGTAALGCLVKDYFPEPVTVSWNSGALTSGVHTFPAVLQSSGLYSLSSVVTVPSSSLGTQTYICNVNHKPSNTKVDKKVEPKSCDKTHTCPPCPAPELLGGPSVFLFPPKPKDTLMISRTPEVTCVVVDVSHEDPEVKFNWYVDGVEVHNAKTKPREEQYNSTYRVVSVLTVLHQDWLNGKEYKCKVSNKALPAPIEKTISKAKGQPREPQVYTLPPSREEMTKNQVSLTCLVKGFYPSDIAVEWESNGQPENNYKTTPPVLDSDGSFFLYSKLTVDKSRWQQGNVFSCSVMHEALHNHYTQKSLSLSPGK

SEQ ID NO: 1074 - protein, 220 aa, Artificial Sequence
  Synthetic Polypeptide
DIVMTQSPDSLAVSLGERATINCKSSQSVLYSSNNRNYLAWYHQKPGQSPKLLISWASTRESGVPDRFSGSGSGTDFTLTINSLQAEDVAVYYCQQYYSIPITFGGGTKVEIKRTVAAPSVFIFPPSDEQLKSGTASVVCLLNNFYPREAKVQWKVDNALQSGNSQESVTEQDSKDSTYSLSSTLTLSKADYEKHKVYACEVTHQGLSSPVTKSFNRGEC

SEQ ID NO: 1075 - protein, 458 aa, Artificial Sequence
  Synthetic Polypeptide
QVQLVESGGGVVQPGRSLRLSCAASGFTFSNYGFHWVRQTPGKGLEWVAVISYDGSNRYYASSVKGRFTISRDNSKNTLYLQMNSLRGEDTALYYCARVYYGSGTYYKNRYYYGMDVWGQGTTVTVSSASTKGPSVFPLAPSSKSTSGGTAALGCLVKDYFPEPVTVSWNSGALTSGVHTFPAVLQSSGLYSLSSVVTVPSSSLGTQTYICNVNHKPSNTKVDKKVEPKSCDKTHTCPPCPAPELLGGPSVFLFPPKPKDTLMISRTPEVTCVVVDVSHEDPEVKFNWYVDGVEVHNAKTKPREEQYNSTYRVVSVLTVLHQDWLNGKEYKCKVSNKALPAPIEKTISKAKGQPREPQVYTLPPSREEMTKNQVSLTCLVKGFYPSDIAVEWESNGQPENNYKTTPPVLDSDGSFFLYSKLTVDKSRWQQGNVFSCSVMHEALHNHYTQKSLSLSPGK

SEQ ID NO: 1076 - protein, 212 aa, Artificial Sequence
  Synthetic Polypeptide
SYELTQPPSVSVALGQTARITCGGHNIGSKGVHWYQQKPGQAPVLVIYRAANRPSGIPERFSGSNSGNTATLTISGTQAGDEADYYCQAFDAGTVVFGGGTQLTVLGQPKAAPSVTLFPPSSEELQANKATLVCLISDFYPGAVTVAWKADSSPVKAGVETTTPSKQSNNKYAASSYLSLTPEQWKSHRSYSCQVTHEGSTVEKTVAPTECS

SEQ ID NO: 1077 - protein, 458 aa, Artificial Sequence
  Synthetic Polypeptide
QVQLVESGGGVVQPGRSLRLSCAASGFTFSNYGFHWVRQTPGKGLEWVAVISYAGSNRYYAASVKGRFTISRDNSKNTLYLQMNSLRGEDTALYYCARVYYGSGTYYKNRYYYGMDVWGQGTTVTVSSASTKGPSVFPLAPSSKSTSGGTAALGCLVKDYFPEPVTVSWNSGALTSGVHTFPAVLQSSGLYSLSSVVTVPSSSLGTQTYICNVNHKPSNTKVDKKVEPKSCDKTHTCPPCPAPELLGGPSVFLFPPKPKDTLMISRTPEVTCVVVDVSHEDPEVKFNWYVDGVEVHNAKTKPREEQYNSTYRVVSVLTVLHQDWLNGKEYKCKVSNKALPAPIEKTISKAKGQPREPQVYTLPPSREEMTKNQVSLTCLVKGFYPSDIAVEWESNGQPENNYKTTPPVLDSDGSFFLYSKLTVDKSRWQQGNVFSCSVMHEALHNHYTQKSLSLSPGK

SEQ ID NO: 1078 - protein, 212 aa, Artificial Sequence
  Synthetic Polypeptide
SYELTQPPSVSVALGQTARITCGGHNIGSKGVHWYQQKPGQAPVLVIYRQSNRPSGIPERFSGSNSGNTATLTISGTQAEDEADYYCQAFDAGTVVFGGGTQLTVLGQPKAAPSVTLFPPSSEELQANKATLVCLISDFYPGAVTVAWKADSSPVKAGVETTTPSKQSNNKYAASSYLSLTPEQWKSHRSYSCQVTHEGSTVEKTVAPTECS

SEQ ID NO: 1079 - protein, 458 aa, Artificial Sequence
  Synthetic Polypeptide
QVQLVESGGGVVQPGRSLRLSCAASGFTFSNYGFHWVRQTPGKGLEWVAVISYSGSNRYYADSVKGRFTISRDNSKNTLYLQMNSLRGEDTALYYCARVYYGSGTYYKNRYYYGMDVWGQGTTVTVSSASTKGPSVFPLAPSSKSTSGGTAALGCLVKDYFPEPVTVSWNSGALTSGVHTFPAVLQSSGLYSLSSVVTVPSSSLGTQTYICNVNHKPSNTKVDKKVEPKSCDKTHTCPPCPAPELLGGPSVFLFPPKPKDTLMISRTPEVTCVVVDVSHEDPEVKFNWYVDGVEVHNAKTKPREEQYNSTYRVVSVLTVLHQDWLNGKEYKCKVSNKALPAPIEKTISKAKGQPREPQVYTLPPSREEMTKNQVSLTCLVKGFYPSDIAVEWESNGQPENNYKTTPPVLDSDGSFFLYSKLTVDKSRWQQGNVFSCSVMHEALHNHYTQKSLSLSPGK

SEQ ID NO: 1080 - protein, 212 aa, Artificial Sequence
  Synthetic Polypeptide
SYELTQPPSVSVALGQTARITCGGHNIGSKGVHWYQQKPGQAPVLVIYRQSNRPSGIPERFSGSNSGNTATLTISGTQAGDEADYYCQAFDAGTVVFGGGTQLTVLGQPKAAPSVTLFPPSSEELQANKATLVCLISDFYPGAVTVAWKADSSPVKAGVETTTPSKQSNNKYAASSYLSLTPEQWKSHRSYSCQVTHEGSTVEKTVAPTECS

SEQ ID NO: 1081 - protein, 212 aa, Artificial Sequence
  Synthetic Polypeptide
SYELTQPLSVSVALGQTARITCGGHNIGSKGVHWYQQKPGQAPVLVIYRNSNRPSGIPERFSGSNSGNTATLTISRAQAGDEADYYCQVWDISTVVFGGGTELTVLGQPKAAPSVTLFPPSSEELQANKATLVCLISDFYPGAVTVAWKADSSPVKAGVETTTPSKQSNNKYAASSYLSLTPEQWKSHRSYSCQVTHEGSTVEKTVAPTECS

SEQ ID NO: 1082 - protein, 458 aa, Artificial Sequence
  Synthetic Polypeptide
QVQLVESGGGVAQPGRSLRLSCAASGFNFSNCGMHWVRQAPGKGLEWVAVISYDGGNKYHADSVKGRFTISRDDSKNTLYLQMDSLRTEDTAVYYCAKVYYGSGIYYKNRYYYGMDVWGQGTTVTVSSASTKGPSVFPLAPSSKSTSGGTAALGCLVKDYFPEPVTVSWNSGALTSGVHTFPAVLQSSGLYSLSSVVTVPSSSLGTQTYICNVNHKPSNTKVDKKVEPKSCDKTHTCPPCPAPELLGGPSVFLFPPKPKDTLMISRTPEVTCVVVDVSHEDPEVKFNWYVDGVEVHNAKTKPREEQYNSTYRVVSVLTVLHQDWLNGKEYKCKVSNKALPAPIEKTISKAKGQPREPQVYTLPPSREEMTKNQVSLTCLVKGFYPSDIAVEWESNGQPENNYKTTPPVLDSDGSFFLYSKLTVDKSRWQQGNVFSCSVMHEALHNHYTQKSLSLSPGK

SEQ ID NO: 1083 - protein, 212 aa, Artificial Sequence
  Synthetic Polypeptide
SYELTQPLSVSVALGQTARITCGGHNIGSKGVHWYQQKPGQAPVLVIYRNSNRPSGIPERFSGSNSGKTATLTISRAQAGDEADYYCQVWDSSTVVFGGGTELTVLGQPKAAPSVTLFPPSSEELQANKATLVCLISDFYPGAVTVAWKADSSPVKAGVETTTPSKQSNNKYAASSYLSLTPEQWKSHRSYSCQVTHEGSTVEKTVAPTECS

SEQ ID NO: 1084 - protein, 458 aa, Artificial Sequence
  Synthetic Polypeptide
QVQLVESGGGVAQPGRSLRLSCAASGFNFSNCGMHWVRQAPGKGLEWVAVISYDGGNKYYADSVKGRFTISRDDSKNTLYLQMDSLRTEDTAVYYCAKVYYGSGIYYKNRYYYGMDVWGQGTTVTVSSASTKGPSVFPLAPSSKSTSGGTAALGCLVKDYFPEPVTVSWNSGALTSGVHTFPAVLQSSGLYSLSSVVTVPSSSLGTQTYICNVNHKPSNTKVDKKVEPKSCDKTHTCPPCPAPELLGGPSVFLFPPKPKDTLMISRTPEVTCVVVDVSHEDPEVKFNWYVDGVEVHNAKTKPREEQYNSTYRVVSVLTVLHQDWLNGKEYKCKVSNKALPAPIEKTISKAKGQPREPQVYTLPPSREEMTKNQVSLTCLVKGFYPSDIAVEWESNGQPENNYKTTPPVLDSDGSFFLYSKLTVDKSRWQQGNVFSCSVMHEALHNHYTQKSLSLSPGK

SEQ ID NO: 1085 - protein, 212 aa, Artificial Sequence
  Synthetic Polypeptide
SYELTQPLSVSVALGQTARITCGGNNIGSKNVHWYQKRPGQAPVLVIYRDSNRPSGIPERFSGSKSGNTATLTISRAQAGDEADYYCQVWDSNTVVFGGGTNLTVLGQPKAAPSVTLFPPSSEELQANKATLVCLISDFYPGAVTVAWKADSSPVKAGVETTTPSKQSNNKYAASSYLSLTPEQWKSHRSYSCQVTHEGSTVEKTVAPTECS

SEQ ID NO: 1086 - protein, 458 aa, Artificial Sequence
  Synthetic Polypeptide
QVQLVESGGGVVQPGRSLRLSCVVSGFNFSNNGMHWVRQAPGKGLEWVAVISNDGSNKYYADSVRGRFTISRDNSKNTLYLQMNSLRAEDTAVYSCAKVYYGSGIYYKNNYYYGMDVWGQGTTVTVSSASTKGPSVFPLAPSSKSTSGGTAALGCLVKDYFPEPVTVSWNSGALTSGVHTFPAVLQSSGLYSLSSVVTVPSSSLGTQTYICNVNHKPSNTKVDKKVEPKSCDKTHTCPPCPAPELLGGPSVFLFPPKPKDTLMISRTPEVTCVVVDVSHEDPEVKFNWYVDGVEVHNAKTKPREEQYNSTYRVVSVLTVLHQDWLNGKEYKCKVSNKALPAPIEKTISKAKGQPREPQVYTLPPSREEMTKNQVSLTCLVKGFYPSDIAVEWESNGQPENNYKTTPPVLDSDGSFFLYSKLTVDKSRWQQGNVFSCSVMHEALHNHYTQKSLSLSPGK

SEQ ID NO: 1087 - protein, 212 aa, Artificial Sequence
  Synthetic Polypeptide
SYELTQPLSVSVALGQTARITCGGNNIGSKNVHWYQQKAGQAPVQVIYRNSNRPSGIPERFSGSNSGNTATLTISRAQAGDEADYYCQVWDSSTVVFGGGTKLTVLGQPKAAPSVTLFPPSSEELQANKATLVCLISDFYPGAVTVAWKADSSPVKAGVETTTPSKQSNNKYAASSYLSLTPEQWKSHRSYSCQVTHEGSTVEKTVAPTECS

SEQ ID NO: 1088 - protein, 458 aa, Artificial Sequence
  Synthetic Polypeptide
QVQLVESGGGVVQPGRSLRLSCAASGFNFNTYGMHWVRQAPGKGLEWVAVISYDGSNKYYADSVKGRFTISRDNSKSTLYLQMNSLRAEDTAVYYCARVYYGSGSYYKKNYYYGMDVWGQGTTVTVSSASTKGPSVFPLAPSSKSTSGGTAALGCLVKDYFPEPVTVSWNSGALTSGVHTFPAVLQSSGLYSLSSVVTVPSSSLGTQTYICNVNHKPSNTKVDKKVEPKSCDKTHTCPPCPAPELLGGPSVFLFPPKPKDTLMISRTPEVTCVVVDVSHEDPEVKFNWYVDGVEVHNAKTKPREEQYNSTYRVVSVLTVLHQDWLNGKEYKCKVSNKALPAPIEKTISKAKGQPREPQVYTLPPSREEMTKNQVSLTCLVKGFYPSDIAVEWESNGQPENNYKTTPPVLDSDGSFFLYSKLTVDKSRWQQGNVFSCSVMHEALHNHYTQKSLSLSPGK

SEQ ID NO: 1089 - protein, 212 aa, Artificial Sequence
  Synthetic Polypeptide
SYELTQPLSVSVALGQTARITCGGNNIGGKNVHWYQQKPGQAPVLVIYRDSNRPSGIPERFSGSKSGNTATLTISRAQAGDESDYYCQVWDSSTVVFGGGTTLTVLGQPKAAPSVTLFPPSSEELQANKATLVCLISDFYPGAVTVAWKADSSPVKAGVETTTPSKQSNNKYAASSYLSLTPEQWKSHRSYSCQVTHEGSTVEKTVAPTECS

SEQ ID NO: 1090 - protein, 458 aa, Artificial Sequence
  Synthetic Polypeptide
QVQVVESGGGVVQPGRSLRLSCAASGFTLSSYGFHWVRQTPGKGLEWVAVISYDGSNKYYADSVKGRFTISRDNSKNTLYLQMNSLRGEDTAVYYCARVYYGSGTYYKNRYYYGMDVWGQGTTVTVSSASTKGPSVFPLAPSSKSTSGGTAALGCLVKDYFPEPVTVSWNSGALTSGVHTFPAVLQSSGLYSLSSVVTVPSSSLGTQTYICNVNHKPSNTKVDKKVEPKSCDKTHTCPPCPAPELLGGPSVFLFPPKPKDTLMISRTPEVTCVVVDVSHEDPEVKFNWYVDGVEVHNAKTKPREEQYNSTYRVVSVLTVLHQDWLNGKEYKCKVSNKALPAPIEKTISKAKGQPREPQVYTLPPSREEMTKNQVSLTCLVKGFYPSDIAVEWESNGQPENNYKTTPPVLDSDGSFFLYSKLTVDKSRWQQGNVFSCSVMHEALHNHYTQKSLSLSPGK

SEQ ID NO: 1091 - protein, 212 aa, Artificial Sequence
  Synthetic Polypeptide
SYELTQPLSVSEALGQTARITCGGNNIGSKNVHWYQQKPGQAPVLVIYRDSNRPSGIPERFSGSKSGNTATLTISRAQAGDEADYYCQVWDSSTVVFGGGTKVTVLGQPKAAPSVTLFPPSSEELQANKATLVCLISDFYPGAVTVAWKADSSPVKAGVETTTPSKQSNNKYAASSYLSLTPEQWKSHRSYSCQVTHEGSTVEKTVAPTECS

SEQ ID NO: 1092 - protein, 458 aa, Artificial Sequence
  Synthetic Polypeptide
QVQLVESGGGVVQPGRSLRLSCVVSGFNFINNGMHWVRQAPGKGLDWVAVISNDGSNKYYPDSVKGRFTISRDNSKNTLYLQMNSLRAEDSAVYYCAKVYYGSGNYYKNNYYYGMDVWGQGTTVTVSSASTKGPSVFPLAPSSKSTSGGTAALGCLVKDYFPEPVTVSWNSGALTSGVHTFPAVLQSSGLYSLSSVVTVPSSSLGTQTYICNVNHKPSNTKVDKKVEPKSCDKTHTCPPCPAPELLGGPSVFLFPPKPKDTLMISRTPEVTCVVVDVSHEDPEVKFNWYVDGVEVHNAKTKPREEQYNSTYRVVSVLTVLHQDWLNGKEYKCKVSNKALPAPIEKTISKAKGQPREPQVYTLPPSREEMTKNQVSLTCLVKGFYPSDIAVEWESNGQPENNYKTTPPVLDSDGSFFLYSKLTVDKSRWQQGNVFSCSVMHEALHNHYTQKSLSLSPGK

SEQ ID NO: 1093 - protein, 212 aa, Artificial Sequence
  Synthetic Polypeptide
SYELTQPLSVSVALGQTARITCEGNNIGSQNVHWYQQKPGQAPVLVMYRDSNRPSGIPERFSGSKSGNTATLAISRAQAGDESDYYCQVWDGSAVVFGGGTTLTVLGQPKAAPSVTLFPPSSEELQANKATLVCLISDFYPGAVTVAWKADSSPVKAGVETTTPSKQSNNKYAASSYLSLTPEQWKSHRSYSCQVTHEGSTVEKTVAPTECS

SEQ ID NO: 1094 - protein, 458 aa, Artificial Sequence
  Synthetic Polypeptide
QMQVVESGGGVVQPGRSLRLSCAASGFTFSSSGMHWVRQAPGKGLEWVAVISHDGSNKYYADSVKGRFTISRDNSKNTLYLQMNSLGGEDTAVYYCAKVYYGSGIYYKNRYYYGMDVWGQGTTVIVSSASTKGPSVFPLAPSSKSTSGGTAALGCLVKDYFPEPVTVSWNSGALTSGVHTFPAVLQSSGLYSLSSVVTVPSSSLGTQTYICNVNHKPSNTKVDKKVEPKSCDKTHTCPPCPAPELLGGPSVFLFPPKPKDTLMISRTPEVTCVVVDVSHEDPEVKFNWYVDGVEVHNAKTKPREEQYNSTYRVVSVLTVLHQDWLNGKEYKCKVSNKALPAPIEKTISKAKGQPREPQVYTLPPSREEMTKNQVSLTCLVKGFYPSDIAVEWESNGQPENNYKTTPPVLDSDGSFFLYSKLTVDKSRWQQGNVFSCSVMHEALHNHYTQKSLSLSPGK

SEQ ID NO: 1095 - protein, 212 aa, Artificial Sequence
  Synthetic Polypeptide
SYELTQPLSVSVALGQTARITCGGHNIGSKGVHWYQQKPGQAPVLVIYRNSNRPSGIPERFSGSNSGNTATLTISRAQAGDEADYYCQVWDSSTVVFGGGTELTVLGQPKAAPSVTLFPPSSEELQANKATLVCLISDFYPGAVTVAWKADSSPVKAGVETTTPSKQSNNKYAASSYLSLTPEQWKSHRSYSCQVTHEGSTVEKTVAPTECS

SEQ ID NO: 1096 - protein, 458 aa, Artificial Sequence
  Synthetic Polypeptide
QVQLVESGGGVAQPGRSLRLSCAASGFNFSDCGMHWVRQAPGKGLEWVAVISYDGGNKYYADSVKGRFTISRDDSKNTLYLQTDSLRTEDTAVYYCAKVYYGSGIYYKNRYYYGMDVWGQGTTVTVSSASTKGPSVFPLAPSSKSTSGGTAALGCLVKDYFPEPVTVSWNSGALTSGVHTFPAVLQSSGLYSLSSVVTVPSSSLGTQTYICNVNHKPSNTKVDKKVEPKSCDKTHTCPPCPAPELLGGPSVFLFPPKPKDTLMISRTPEVTCVVVDVSHEDPEVKFNWYVDGVEVHNAKTKPREEQYNSTYRVVSVLTVLHQDWLNGKEYKCKVSNKALPAPIEKTISKAKGQPREPQVYTLPPSREEMTKNQVSLTCLVKGFYPSDIAVEWESNGQPENNYKTTPPVLDSDGSFFLYSKLTVDKSRWQQGNVFSCSVMHEALHNHYTQKSLSLSPGK

SEQ ID NO: 1097 - protein, 212 aa, Artificial Sequence
  Synthetic Polypeptide
SYELTQPLSVSVALGQTGRITCGGNNIGSKNVHWYQQKPGQAPVLVIYRSSNRPSGIPERFSGSNSGNTATLTISRAQAGDESDYYCQIWDSSTVVFGGGTKLTVLGQPKAAPSVTLFPPSSEELQANKATLVCLISDFYPGAVTVAWKADSSPVKAGVETTTPSKQSNNKYAASSYLSLTPEQWKSHRSYSCQVTHEGSTVEKTVAPTECS

SEQ ID NO: 1098 - protein, 458 aa, Artificial Sequence
  Synthetic Polypeptide
QVQVVESGGGVVQPGRSLRLSCAASGFTFSSYGMHWVRQAPGKGLEWVAVISFDGNNKYYADSVKGRFTISRDNSKNTLYLQMNSLRGEDTAVYYCARVYYGSGSYYKNRYYYGMDVWGQGTTVTVSTASTKGPSVFPLAPSSKSTSGGTAALGCLVKDYFPEPVTVSWNSGALTSGVHTFPAVLQSSGLYSLSSVVTVPSSSLGTQTYICNVNHKPSNTKVDKKVEPKSCDKTHTCPPCPAPELLGGPSVFLFPPKPKDTLMISRTPEVTCVVVDVSHEDPEVKFNWYVDGVEVHNAKTKPREEQYNSTYRVVSVLTVLHQDWLNGKEYKCKVSNKALPAPIEKTISKAKGQPREPQVYTLPPSREEMTKNQVSLTCLVKGFYPSDIAVEWESNGQPENNYKTTPPVLDSDGSFFLYSKLTVDKSRWQQGNVFSCSVMHEALHNHYTQKSLSLSPGK

SEQ ID NO: 1099 - protein, 212 aa, Artificial Sequence
  Synthetic Polypeptide
SYELTQPLSVSVALGQTARITCGGNNIGSKNVHWYQQRPGQAPVLVIYRDSNRPSGIPERLSGSKAGNTATLTISRAHAGDEADYYCQVWDSSTVVFGGGTELTVQGQPKAAPSVTLFPPSSEELQANKATLVCLISDFYPGAVTVAWKADSSPVKAGVETTTPSKQSNNKYAASSYLSLTPEQWKSHRSYSCQVTHEGSTVEKTVAPTECS

SEQ ID NO: 1100 - protein, 458 aa, Artificial Sequence
  Synthetic Polypeptide
QVQLVESGGGVVQPGRSLRLSCAVSGFTFSSNGMHWVRQAPGKGLEWVAVISNDGSNKYYGDSVKGRFTISRDNSKNTLYLQMNSLRAEDTAVYYCAKVYYGSGIYYRNNYYYGMDVWGQGTTVTVSSASTKGPSVFPLAPSSKSTSGGTAALGCLVKDYFPEPVTVSWNSGALTSGVHTFPAVLQSSGLYSLSSVVTVPSSSLGTQTYICNVNHKPSNTKVDKKVEPKSCDKTHTCPPCPAPELLGGPSVFLFPPKPKDTLMISRTPEVTCVVVDVSHEDPEVKFNWYVDGVEVHNAKTKPREEQYNSTYRVVSVLTVLHQDWLNGKEYKCKVSNKALPAPIEKTISKAKGQPREPQVYTLPPSREEMTKNQVSLTCLVKGFYPSDIAVEWESNGQPENNYKTTPPVLDSDGSFFLYSKLTVDKSRWQQGNVFSCSVMHEALHNHYTQKSLSLSPGK

SEQ ID NO: 1101 - protein, 212 aa, Artificial Sequence
  Synthetic Polypeptide
SYELTQPLSVSVALGQTARITCGGNNIGSKNVHWYQQKPGQAPILVIYRNTNRPSGIPERFSGSNSGNTATLTISRAQVGDESDYFCQVWDSSTVVFGGGTKLTVLGQPKAAPSVTLFPPSSEELQANKATLVCLISDFYPGAVTVAWKADSSPVKAGVETTTPSKQSNNKYAASSYLSLTPEQWKSHRSYSCQVTHEGSTVEKTVAPTECS

SEQ ID NO: 1102 - protein, 458 aa, Artificial Sequence
  Synthetic Polypeptide
QVQVVESGGGVVQPGRSLRLSCGASGFTFSGYGMHWVRQAPGKGLEWVAVISYDGSNKYYADSVKGRFPISRDNSKNTLYLQMNSLRGEDTAVYYCARVYYGSGIYYKNRYYYGMDVWGQGTTVAVSSASTKGPSVFPLAPSSKSTSGGTAALGCLVKDYFPEPVTVSWNSGALTSGVHTFPAVLQSSGLYSLSSVVTVPSSSLGTQTYICNVNHKPSNTKVDKKVEPKSCDKTHTCPPCPAPELLGGPSVFLFPPKPKDTLMISRTPEVTCVVVDVSHEDPEVKFNWYVDGVEVHNAKTKPREEQYNSTYRVVSVLTVLHQDWLNGKEYKCKVSNKALPAPIEKTISKAKGQPREPQVYTLPPSREEMTKNQVSLTCLVKGFYPSDIAVEWESNGQPENNYKTTPPVLDSDGSFFLYSKLTVDKSRWQQGNVFSCSVMHEALHNHYTQKSLSLSPGK

SEQ ID NO: 1103 - protein, 212 aa, Artificial Sequence; identical to SEQ ID NO: 1101
  Synthetic Polypeptide

SEQ ID NO: 1104 - protein, 458 aa, Artificial Sequence
  Synthetic Polypeptide
QVQVVESGGGVVQPGRSLRLSCGASGFTFSGYGMHWVRQAPGKGLEWVAVISYDGSNKYYADSVKGRFTISRDNSKNTLYLQMNSLRGEDTAVYYCARVYYGSGIYYKNRYYYGMDVWGQGTTVAVSSASTKGPSVFPLAPSSKSTSGGTAALGCLVKDYFPEPVTVSWNSGALTSGVHTFPAVLQSSGLYSLSSVVTVPSSSLGTQTYICNVNHKPSNTKVDKKVEPKSCDKTHTCPPCPAPELLGGPSVFLFPPKPKDTLMISRTPEVTCVVVDVSHEDPEVKFNWYVDGVEVHNAKTKPREEQYNSTYRVVSVLTVLHQDWLNGKEYKCKVSNKALPAPIEKTISKAKGQPREPQVYTLPPSREEMTKNQVSLTCLVKGFYPSDIAVEWESNGQPENNYKTTPPVLDSDGSFFLYSKLTVDKSRWQQGNVFSCSVMHEALHNHYTQKSLSLSPGK

SEQ ID NO: 1105 - protein, 212 aa, Artificial Sequence
  Synthetic Polypeptide
SYDLTQPLSVSVALGQTARITCGGNNIGDKNVHWYQQKPGQAPVLVIYRNNVRPSGIPERFSGSNSGNTATLTISRAQAGDEADYYCQVWDSSTVVFGGGTKLTVLGQPKAAPSVTLFPPSSEELQANKATLVCLISDFYPGAVTVAWKADSSPVKAGVETTTPSKQSNNKYAASSYLSLTPEQWKSHRSYSCQVTHEGSTVEKTVAPTECS

SEQ ID NO: 1106 - protein, 458 aa, Artificial Sequence
  Synthetic Polypeptide
QVQLVESGGGVVQPGRSLRLSCAASGLNFSNFGMHWVRQAPGKGLDWVAVISYDGGNKYYADSVKGRFTVSRDNSKNTLFLQMNSLRAEDTALYYCAKVYYGSGSYYKKRYYYGMDVWGQGTTVTVSSASTKGPSVFPLAPSSKSTSGGTAALGCLVKDYFPEPVTVSWNSGALTSGVHTFPAVLQSSGLYSLSSVVTVPSSSLGTQTYICNVNHKPSNTKVDKKVEPKSCDKTHTCPPCPAPELLGGPSVFLFPPKPKDTLMISRTPEVTCVVVDVSHEDPEVKFNWYVDGVEVHNAKTKPREEQYNSTYRVVSVLTVLHQDWLNGKEYKCKVSNKALPAPIEKTISKAKGQPREPQVYTLPPSREEMTKNQVSLTCLVKGFYPSDIAVEWESNGQPENNYKTTPPVLDSDGSFFLYSKLTVDKSRWQQGNVFSCSVMHEALHNHYTQKSLSLSPGK

SEQ ID NO: 1107 - protein, 212 aa, Artificial Sequence
  Synthetic Polypeptide
SYELTQPLSVSVALGQTARITCGGNNIGSKNVHWYQQKPGQAPVLVIYRDSNRPSGIPERFSGSKSGNTATLTISRAQAGDEADYYCQVWDSSTVVFGGGAKLTVLGQPKAAPSVTLFPPSSEELQANKATLVCLISDFYPGAVTVAWKADSSPVKAGVETTTPSKQSNNKYAASSYLSLTPEQWKSHRSYSCQVTHEGSTVEKTVAPTECS

SEQ ID NO: 1108 - protein, 458 aa, Artificial Sequence
  Synthetic Polypeptide
QVQLVESGGGVVQPGRSLRLSCAASGFNFSSCGMHWVRQAPGKGLEWVAVISYDGTNKYYADSVKGRFTISRDNSKNTLYLQMNSLRAEDTAVYYCAKVYYGSGIYYKKNYYYGMDVWGQGTTVTVSSASTKGPSVFPLAPSSKSTSGGTAALGCLVKDYFPEPVTVSWNSGALTSGVHTFPAVLQSSGLYSLSSVVTVPSSSLGTQTYICNVNHKPSNTKVDKKVEPKSCDKTHTCPPCPAPELLGGPSVFLFPPKPKDTLMISRTPEVTCVVVDVSHEDPEVKFNWYVDGVEVHNAKTKPREEQYNSTYRVVSVLTVLHQDWLNGKEYKCKVSNKALPAPIEKTISKAKGQPREPQVYTLPPSREEMTKNQVSLTCLVKGFYPSDIAVEWESNGQPENNYKTTPPVLDSDGSFFLYSKLTVDKSRWQQGNVFSCSVMHEALHNHYTQKSLSLSPGK

SEQ ID NO: 1109 - protein, 445 aa, Artificial Sequence; identical to SEQ ID NO: 1073
  Synthetic Polypeptide

SEQ ID NO: 1110 - protein, 220 aa, Artificial Sequence
  Synthetic Polypeptide
DIVMTQSPDSLAVSLGERATINCKSSQSVLYSSNNKNYLAWYHQKPGQSPKLLISWASTRESGVPDRFSGSGSGTDFTLTINSLQAEDVAVYYCQQYYSIPITFGGGTKVEIKRTVAAPSVFIFPPSDEQLKSGTASVVCLLNNFYPREAKVQWKVDNALQSGNSQESVTEQDSKDSTYSLSSTLTLSKADYEKHKVYACEVTHQGLSSPVTKSFNRGEC

SEQ ID NO: 1111 - DNA, 747 bp, Artificial Sequence
  Synthetic Polynucleotide
caggtgcagctggtggagtctgggggaggcgtggtccagcctgggaggtccctgagactctcctgtgtagtctctggattcaacttcagtaacaatggcatgcactgggtccgccaggctccaggcaagggactggagtgggtggcagttatttcaaatgatggaagtaataaatactatgcagactccgtgaagggccgattcaccatctccagagacaattccaagaacacgctgtatctacaaatgaacagcctgagaactgaggacacggctgtgtattactgtgcgaaagtttactatggttcgggtatttattataaaaacaggaactactacggtatggacgtctggggccaagggaccacggtcaccgtctcctcaggtggtggtggttctggcggcggcggctccggtggtggtggttcttcatatgagctgactcagccaccctcagtgtcagtggccctgggacagacggccaggattacctgtgggggaaacaacattggaagtcaaaatgtgcactggtaccagcagaagccaggccaggcccctgtgctggtcatctatagggatagcaaccggccctctgggatccctgaccgattctctggctccaagtcggggaacacggccaccctgaccatcagcagagcccaagccggggatgaggctgactattactgtcaggtgtgggacagcagcactgtggttttcggcggagggaccaagctgaccgtccta

SEQ ID NO: 1112 - DNA, 747 bp, Artificial Sequence
  Synthetic Polynucleotide
caggtgcagctggtggagtctgggggaggcgtggtccagcctgggaggtccctgagactctcctgtgcagcctctggattcaacttcagtaactatggcatgcactgggtccgccaggctccaggcaaggggctggaatgggtggcagttatatcatatgatggaagtaataaatattatgcagactccgtgaagggccgattcaccatctccagagacaattccaagaacacgctgtatctacaaatgaacagcctgagagctgaggacacggctgtgtatttctgtgcgagagtttactatggttcggggatttattataaaaagagatactactacggtatggacgtctggggccaagggaccacggtcaccgtctcctcaggtggtggtggttctggcggcggcggctccggtggtggtggttcttcatatgagctgactcagccaccctcagtgtcagtggccctgggacagacggccaggattacctgtgggggacacaacattggaagtaaaggtgtgcactggtaccagcagaagccaggccaggcccctgtgctggtcatctataggaatagcaaccggccctctgggatccctgagcgattctctggctccaactcggggaacacggccaccctgaccatcaccagagcccaagccggggatgaggctgactattactgtcaggtgtgggacagcagcactgtggttttcggcggagggaccaagctgaccgtccta

SEQ ID NO: 1113 - DNA, 747 bp, Artificial Sequence
  Synthetic Polynucleotide
caggtgcagctggtggagtccgggggaggcgtggtccagcctgggaggtccctgagactctcctgtgcaccctctggattcaacttcagtaactatggcatgcactgggtccgccaggctccaggcaaggggctggagtgggtggcagttatatcatatgatggaagtaataaatattatgcagactccgtgaagggccgattcaccatctccagagacaattccaaaaacacgctgtttctgcaaatgaacagcctgagagctgaggacacggctgtgtatttctgtgcgagagtttactatggttcggggagttattataaaaagagatactactacggtatggacgtctggggccaagggaccacggtcaccgtctcctcaggtggtggtggttctggcggcggcggctccggtggtggtggttcttcatatgagctgactcagccaccctcagtgtcagtggccctgggacagacggccaggattacctgtgggggaaacaacattggaagtcaaaatgtgcactggtaccagcagaagccaggccaggcccctgtgctggtcatctatagggatagcaaccggccctctgggatccctgagcgattctctggctccaagtcggggaacacggccaccctgaccatcagcagagcccaagccggggatgaggctgactattactgtcaggtgtgggacagcagcactgtggttttcggcggaggcacccagctgaccgtccta

SEQ ID NO: 1114 - DNA, 747 bp, Artificial Sequence
  Synthetic Polynucleotide
caggtgcagctggtggagtccgggggaggcgtggtccagcctgggaggtccctgagactctcctgtgcagcgtctggattcaccttcagtagctctggcatgcactgggtccgccaggctccaggcaaggggctggagtgggtggcagttatatcatatgatggaactaataaatactatgcggactccgtgaagggccgattcaccatctccagagacaattccaagaacacgctgtatctgcaaatgaacagcctgagagctgaggacacggctgtgtattactgtgcgaaagtttactatggttcgggtatttattataaaaacaggtactactacggtatggacgtctggggccaagggaccacggtcaccgtctcctcaggtggtggtggttctggcggcggcggctccggtggtggtggttcttcatatgagctgactcagccaccctcagtgtcagtggccctgggacagacggccaggattacctgtgggggacacaacattggaagtaaaggtgtgcactggtaccagcagaagccaggccaggcccctgtgctggtcatctatagaaatagcaaccggccctctgggatccctgagcgattctctggctccaactcggggaacacggccaccctgaccatcagcagagcccaagccggggatgaggctgactattactgtcaggtgtgggacagcagcactgtggttttcggcggaggcacccagctgaccgtccta

SEQ ID NO: 1115 - DNA, 747 bp, Artificial Sequence
  Synthetic Polynucleotide
caggtgcagctggtggagtctgggggaggcgtggtccagcctgggaggtccctgagactctcctgtgcagtctctggattcaacttcagtaactatggcatgcactgggtccgccaggttccaggcagggggctagattgggtggcagttatatcaaatgatggaagtaataaatactatgcagactccgtgaagggccgattcaccatttccagagacaattccaagaacacactgtatctgcaaatggacagcctgagaactgaggacacggctgtgtattactgtgcgaaagtttactatggttcgggtatttattataaaaagagatactactacggtatggacgtctggggccaagggaccacggtcaccgtctcctcaggtggtggtggttctggcggcggcggctccggtggtggtggttcttcatatgagctgactcagccaccctcagtgtcagtggccctgggacagacggccaggattacctgtgggggacacaacattggaagtcaaaatgtgcactggtaccagcagaagccaggccaggcccctgtgctggtcatctatagggatagcaaccggccctctgggatccctgagcgattctctggctccaagtcggggaacacggccaccctgaccatcagcagagcccaagccggggatgaggctgactattactgtcaggtgtgggacagcagcactgtggttttcggcggaggcacccagctgaccgtccta

SEQ ID NO: 1116 - DNA, 747 bp, Artificial Sequence
  Synthetic Polynucleotide
caggtgcagctggtggagtccgggggaggcgtggtccagcctgggaggtccctgagactctcctgtgcagcctctggattcaacttcagtaactatggcatgcactgggtccgccaggctccaggcaaggggctggaatgggtggcagttatatcatatgatggaagtaataaatattatgcagactccgtgaagggccgattcaccatctccagagacaattccaagaacacgctgtatctacaaatgaacagcctgagagctgaggacacggctgtgtatttctgtgcgagagtttactatggttcggggatttattataaaaagagatactactacgggatggacgtctggggccaagggaccacggtcaccgtctcctcaggtggtggtggttctggcggcggcggctccggtggtggtggttcttcatatgagctgactcagccaccctcggtgtcagtggccccaggacagacggccaggattacctgtgggggaaacaacattggaagtaaaaatgtgcactggtaccagcagaaggcaggccaggcccctgtgcaggtcatctatagaaatagcaaccggccctctgggatccctgcgcgattctctggctccaactcggggaacacggccaccctgaccatcagcagagcccaggccggggatgaggctgactattactgtcaggtgtgggacagcagcactgtggttttcggcggtgggaccaagctgaccgtccta

SEQ ID NO: 1117 - DNA, 744 bp, Artificial Sequence
  Synthetic Polynucleotide
caggtgcagctggtggagtccgggggaggcgtggtccagcctgggaggtccctgagactctcctgtgcagcctctggattcaccttcagtagctatggcatgcactgggtccgccaggctccaggcaaggggctggagtgggtggcagttatatcatatgatggaagtaataaatactatgcagactccgtgaagggccgattcaccatctccagagacaattccaagaacacgctgtatctgcaaatgaacagcctgagaggtgaggacacggcggtgtattactgtgcgagagtttactatggttcggggagttattataaaaaccgctactactacggtatggacgtctggggccaagggaccacggtcaccgtctcctcaggtggtggtggttctggcggcggcggctccggtggtggtggttcttcatatgagctgactcagccaccctcggtgtcagtggccccaggacagacggccaggattccctgtgggggaaacaacattggaagtaaaaatgtgcactggtaccagcagaagccaggccaggcccctgtactggtcatctatagggatatcaaccggccctctgggatccctgagcgattctctggctccaactcggggaacacggccaccctgaccatcagcagagcccaagccggggatgaggctgactattactgtcaggtgtgggacagcagcgtggtattcggcggagggaccaagctgaccgtcctc

SEQ ID NO: 1118 - DNA, 747 bp, Artificial Sequence
  Synthetic Polynucleotide
caggtgcagctggtggagtccgggggaggcgtggtccagcctgggaggtccctgagactctcctgtgcagcctctggattcaacttcagtaactatggcatgcactgggtccgccaggctccaggcaaggggctggaatgggtggcagttatatcatatgatggaagtaataaatattatgcagactccgtgaagggccgattcaccatctccagagacaattccaagaacacgctgtatctacaaatgaacagcctgagagctgaggacacggctgtgtatttctgtgcgagagtttactatggttcggggatttattataaaaagagatactactacggtatggacgtctggggccaagggaccacggtcaccgtctcctcaggtggtggtggttctggcggcggcggctccggtggtggtggttcttcatatgagctgactcagccaccctcagtgtcagtggccctgggacagacggccaggcttacctgtgagggaaacaacattggaagtaaaaatgtgcactggtaccagcagaagccaggccaggcccctgtgctggtcatctataggaatagcaaccggccctctgggatccctgagcgattctctggctccaactcggggaacacggccaccctgactattagcagagtccaagccggggatgaggctgactattactgtcaggcgtgggacagcagcactgtggtattcggcggaggcacccagctgaccgtccta

SEQ ID NO: 1119 - DNA, 753 bp, Artificial Sequence
  Synthetic Polynucleotide
caggtgcagctggtggagtccgggggaggcctggtcaagcctggggggtccctgagactctcctgtgcagtctctggattcaacttcagtaacaatggcatgcactgggtccgccaggctccaggcaaggggctggagtgggtggcagtcatatcgtatgatggaagtaataaatactatacagactccgtgaagggccgattcaccatctccagagacaattccaagaacacgctgtatctgcaaatgaacagcctgagaactgaggacacggctgtgtattactgtgcgaaagtttactatggttcgggtatttattataaaaagagatactactacggtatggacgtctggggccaagggaccacggtcaccgtctcctcaggtggtggtggttctggcggcggcggctccggtggtggtggttcttcatatgagctgactcagccactctcagtgtcagaggccctgggacagacggccaggattacctgtgggggaaacaacattggaagtaaaaatgtgcactggtaccagcagaagccaggccaggcccctgtactggtcatctatagggatagcaaccggccctcagggatccctgagcgattctctggctccaactctgggaacgcggccaccctgaccatcagtagggtcgaagccggggatgaggccgactattactgtcaggtgtgggatagtagcagtgatcatgtggtattcggcggaggcacccagctgaccgtccta

SEQ ID NO: 1120 - DNA, 747 bp, Artificial Sequence
  Synthetic Polynucleotide
caggtgcagctggtggagtctgggggaggcgtggtccagcctgggaggtccctgagactctcctgtgcagcctctggattcaacttcagtaactatggcatgcactgggtccgccaggctccaggcaaggggctggaatgggtggcagttatatcatatgatggaagtaataaatattatgcagactccgtgaagggccgattcaccatctccagagacaattccaagaacacgctgtatctacaaatgaacagcctgagagctgaggacacggctgtgtatttctgtgcgagagtttactatggttcggggatttattataaaaagagatactactacggtatggacgtctggggccaagggaccacggtcaccgtctcctcaggtggtggtggttctggcggcggcggctccggtggtggtggttcttcatatgagctgactcagccaccctcggtgtcagtggccccaggacagacggccaggattacctgtgggggaaacaacattggaagtaaaaatgtgcactggtaccagcagaagccaggccaggcccctgtactggtcatctatagaaatagcaaccggccctctgggatccctgagcgattctctggctccaactctgggaacacagccactctgaccatcagcgggacccaggctatggatgaggctgactattactgtcaggcgtgggacagcagcaatgtggtattcggcggaggcacccagctgaccgtccta

SEQ ID NO: 1121 - DNA, 747 bp, Artificial Sequence
  Synthetic Polynucleotide
caggtgcagctggtggagtccgggggaggcgtggtccagcctgggaggtccctgagactctcctgtgtagtctctggattcaacttcagtaggaatggcatgcactgggtccgccaggttccaggcagggggctagattgggtggcagttatatcaaatgatggaagtaataaatactatgcagactccgtgaagggccgattcaccatctccagagacaattccaagaacacgctgtatctgcaaatgaacagcctgagagctgaggacacggctgtgtattactgtgcgaaagtttactatggttcggggatttattataaaaataactactattacggtatggacgtctggggccaagggaccacggtcaccgtctcctcaggtggtggtggttctggcggcggcggctccggtggtggtggttcttcatatgagctgactcagccactctcagtgtcagtggccctgggacagacggccaggattacctgtgggggaaacaacattggaagtcaaaatgtgcactggtaccagcagaagccaggccaggcccctgtgctggtcatctatagggatagcaaccggccctctgggatccctgaccgattctctggctccaagtcggggaacacggccaccctgaccatcagcagagcccaagccggggatgaggctgactattactgtcaggtgtgggacagcagcactgtggttttcggcggaggcacccagctgaccgtccta

SEQ ID NO: 1122 - DNA, 747 bp, Artificial Sequence
  Synthetic Polynucleotide
caggtgcagctggtggagtctgggggaggcgtggtccagcctgggaggtccctgagactctcctgtgtagtctctggattcaacttcagtaggaatggcatgcactgggtccgccaggttccaggcagggggctagattgggtggcagttatatcaaatgatggaagtaataaatactatgcagactccgtgaagggccgattcaccatctccagagacaattccaagaacacgctgtatctgcaaatgaacagcctgagagctgaggacacggctgtgtattactgtgcgaaagtttactatggttcggggatttattataaaaaccgctattactacggtatggacgtctggggccaagggaccacggtcaccgtctcctcaggtggtggtggttctggcggcggcggctccggtggtggtggttcttcatatgagctgactcagccaccctcggtgtcagtggccccaggacagacggccaggattacctgtgggggaaacaacattggaagtaaaaatgtgcactggtaccagcagaagccaggccaggcccctgtgctggtcatctatagggatagcaaccggccctctgggatccctgagcgattctctggctccaagtcggggaccacggccaccctgaccatcagcagagcccaagccggggatgaggctgagtattactgtcaggtgtgggacagcagcactgtggttttcggcggagggaccgagctgaccgtccta

SEQ ID NO: 1123 - DNA, 747 bp, Artificial Sequence
  Synthetic Polynucleotide
caggtgcagctggtggagtccgggggaggcgtggtccagcctgggaggtccctgagactctcctgtgcagcctctggattcaacttcagtaactatggcatgcactgggtccgccaggctccaggcaaggggctggaatgggtggcagttatatcatatgatggaagtaataaatattatgcagactccgtgaagggccgattcaccatctccagagacaattccaagaacacgctgtatctacaaatgaacagcctgagagctgaggacacggctgtgtatttctgtgcgagagtttactatggttcggggatttattataaaaagagatactactacggtatggacgtctggggccaagggaccacggtcaccgtctcctcaggtggtggtggttctggcggcggcggctccggtggtggtggttcttcatatgagctgacacagccactctcagtgtcagtggccctgggacagacggccaggattacctgtgggggaaacaacattggaagtaaaaatgtgcactggtaccagcagaagccaggccaggcccctgtgctggccatctataggaatagcaaccggccctctgggatccctgagcgattcactggctccaactcggggaacacggccaccctgaccatcagcagagcccaagccggggatgagtctgactattactgtcaaatatgggacagcagcactgtggtattcggcggaggcaccaagctgaccgtccta

SEQ ID NO: 1124 - DNA, 747 bp, Artificial Sequence
  Synthetic Polynucleotide
caggtgcagctggtggagtccgggggaggcgtggtccagcctgggaggtccctgagactctcctgtgcagcctctggattcaacttcagtaggaatggcatgcactgggtccgccaggttccaggcagggggctagattgggtggcagttatatcaaatgatggaagtaataaatactatgcggactccgtgaagggccgattcaccatctccagagacaattccaagaacacgctgtatctgcaaatgaacagcctgagagctgaggacacggctgtgtattactgtgcgaaagtttactatggttcgggtatttattataaaaagaactactactacggtatggacgtctggggccaagggaccacggtcaccgtctcctcaggtggtggtggttctggcggcggcggctccggtggtggtggttcttcatatgagctgactcagccaccctcggtgtcagtggccctgggacagacggccaggatttcctgtgggggaaacaacattggaagtaaaaatgtgcactggtaccagcagaagccaggccaggcccctgtgctggtcatctatagggatagcaaccggccctctgggatccctgagcgattctctggctccaagtcggggaccacggccaccctgaccatcagcagagcccaagccggggatgaggctgagtattactgtcaggtgtgggacagcagcactgtggttttcggcggaggcacccagctgaccgtccta

SEQ ID NO: 1125 - DNA, 747 bp, Artificial Sequence
  Synthetic Polynucleotide
caggtgcagctggtggagtccgggggaggcgtggtccagcctgggaggtccctgagactctcctgtgcagtctctggattcaacttcagtaacaatggcatgcactgggtccgccaggctccaggcaaggggctggagtgggtggcagtcatatcgtatgatggaagtaataaatactatacagactccgtgaagggccgattcaccatctccagagacaattccaagaacacgctgtatctgcaaatgaacagcctgagaactgaggacacggctgtgtattactgtgcgaaagtttactatggttcgggtatttattataaaaagagatactactacggtatggacgtctggggccaagggaccacggtcaccgtctcctcaggtggtggtggttctggcggcggcggctccggtggtggtggttcttcatatgagctgactcagccaccctcagtgtcagtggccctgggacagacggccaggattacctgtgagggaaacaacattggaagtcaaaatgtgcactggtaccagcagaagccaggccaggcccctgtgctggtcatgtatagggatagcaaccggccctctgggatccctgaacgattctctggctccaagtcggggaacacggccaccctggccatcagcagagcccaagccggggatgagtctgactattactgtcaggtgtgggacggcagtgccgtggtattcggcggagggaccaagctgaccgtccta

SEQ ID NO: 1126 - DNA, 747 bp, Artificial Sequence
  Synthetic Polynucleotide
caggtgcagctggtggagtctgggggaggcgtggtccagcctgggaggtccctgagactctcctgtgcagcgtctggattcaccttcagtagctatggcatgcactgggtccgccaggctccaggcaaggggctggagtgggtggcagttatatcatatgatggaagtaataaatattatgcagactccgtgaagggccgattcaccatctccagagacaattccaagaacacgctgtatctacaaatgaacagcctgagagctgaggacacggctgtgtatttctgtgcgagagtttactatggttcggggatttattataaaaagagatactactacggtatggacgtctggggccaagggaccacggtcaccgtctcctcaggtggtggtggttctggcggcggcggctccggtggtggtggttcttcatatgagctgactcagccactctcagtgtcagtggccctgggacagacggccaggattacctgtgagggaaacaacattggaagtcaaaatgtgcactggtaccagcagaagccaggccaggcccctgtgctggtcatgtatagggatagcaaccggccctctgggatccctgaacgattctctggctccaagtcggggaacacggccaccctggccatcagcagagcccaagccggggatgagtctgactattactgtcaggtgtgggacggcagtgccgtggtattcggcggaggcacccagctgaccgtccta

SEQ ID NO: 1127 - DNA, 747 bp, Artificial Sequence
  Synthetic Polynucleotide
caggtgcagctggtggagtccgggggaggcgtggtccagcctgggaggtccctgagactctcctgtgcagcctctggattcaccttcagtaactatggctttcactgggtccgccagactccaggcaaggggctggagtgggtggcagttatatcatatgatggaagtaatagatactatgcagactccgtgaagggccgattcaccatctccagagacaattccaagaacacgctgtatctccaaatgaacagcctgagaggtgaggacacggcgctatattactgtgcgagagtttactatggttcggggacttattataaaaaccgctactactacggtatggacgtctggggccaagggaccacggtcaccgtctcctcaggtggtggtggttctggcggcggcggctccggtggtggtggttcttcatatgagctgactcagccaccctcagtgtcagtggccctgggacagacggccaggattacctgtgggggacacaacattggaagtaaaggtgtgcactggtaccagcagaagccaggccaggcccctgtactggtcatctatagaaatagcaaccggccctctgggatccctgagcgattctctggctccaactctgggaacacagccactctgaccatcagcgggacccaggctatggatgaggctgactattactgtcaggcgtgggacagcggcactgtggtattcggcggaggcacccagctgaccgtccta

SEQ ID NO: 1128 - DNA, 753 bp, Artificial Sequence
  Synthetic Polynucleotide
caggtgcagctggtggagtccgggggaggcgtggtccagcctgggaggtccctgagactctcctgtgcagcctctggattcaccttcagtaactatggctttcactgggtccgccagactccaggcaaggggctggagtgggtggcagttatatcatatgatggaagtaatagatactatgcagactccgtgaagggccgattcaccatctccagagacaattccaagaacacgctgtatctccaaatgaacagcctgagaggtgaggacacggcgctatattactgtgcgagagtttactatggttcggggacttattataaaaaccgctactactacggtatggacgtctggggccaagggaccacggtcaccgtctcctcaggtggtggtggttctggcggcggcggctccggtggtggtggttcttcatatgagctgactcagccaccctcagtgtcagtggccctgggacagacggccaggattacctgtggggcaaacaacattggaagtaaaaatgttcactggtaccagcagaagccaggccagccccctgtgctggtcatctatagagatttcaaccggccctctgggatccctgagcgattctctgcctccaactcggggaacacggccaccctgaccatcagcagaggccaagccggggatgaggctgactattactgtcaggtgtgggacagcagcactgggaatgtggtattcggcggagggaccaagctgaccgtccta

SEQ ID NO: 1129 - DNA, 747 bp, Artificial Sequence
  Synthetic Polynucleotide
caggtgcagctggtggagtctgggggaggcgtggtccagcctgggaggtccctgagactctcctgtgcagcctctggattcatcttcagtaactatggctttcactgggtccgccagactccaggcaaggggctggagtgggtggcagttatatcatatgatggaagtaataaatactatgcagactccgtgaagggccgattcaccatctccagagacaattccaagaacacgctgtatctgcaaatgaacagcctgagaggtgaggacacggcggtgtattactgtgcgagagtttactatggttcggggagttattataaaaaccgctactactacggtatggacgtctggggccaagggaccacggtcaccgtctcctcaggtggtggtggttctggcggcggcggctccggtggtggtggttcttcatatgagctgactcagccaccctcggtgtcagtggccccaggacagacggccaggattacctgtgggggaaacaacattggaagtaaaaatgtgcactggtaccagcagaagccaggccaggcccctgtgctggtcatctatagggatagcaaccggccctctgggatccctgagcgattctctggctccaagtcggggaccacggccaccctgaccatcagcagagcccaagccggggatgaggctgactattactgtcaggtgtgggacagcagcactgtggttttcggcggagggaccgagctgaccgtccta

SEQ ID NO: 1130 - DNA, 753 bp, Artificial Sequence
  Synthetic Polynucleotide
caggtgcagctggtggagtctgggggaggcgtggtccagcctgggaggtccctgagactctcctgtgcagcctctggattcaacttcagtaactatggcatgcactgggtccgccaggctccaggcaaggggctggaatgggtggcagttatatcatatgatggaagtaataaatattatgcagactccgtgaagggccgattcaccatctccagagacaattccaagaacacgctgtatctacaaatgaacagcctgagagctgaggacacggctgtgtatttctgtgcgagagtttactatggttcggggatttattataaaaagagatactactacggtatggacgtctggggccaagggaccacggtcaccgtctcctcaggtggtggtggttctggcggcggcggctccggtggtggtggttcttcatatgagctgactcagtcatcctcggtgtcagtggccccaggacagacggccaggattacctgtgggggaaacaacattggaagtaaaaatgtgcactggtaccagcagaagccaggccaggcccctgtgttggtcatctatagggatagcaaccggccctctgggatccctgagcgattctctggctccaagtcggggaccacggccaccctgaccatcagcagggtcgaagccggggatgaggccgactattactgtcaggtgtgggatagtagtagtgctcatgtgatattcggcggagggaccaagctgaccgtccta

SEQ ID NO: 1131 - DNA, 747 bp, Artificial Sequence
  Synthetic Polynucleotide
caggtgcagctggtggagtccgggggaggcgtggtccagcctgggaggtccctgagactctcctgtggagcctctggattcaccttcagtggctatggcatgcactgggtccgccaggctccaggcaaggggctggagtgggtggcagttatatcatatgatggaagtaataaatactatgcagactccgtgaagggccgattcaccatctcaagagacaattccaagaacacgctgtatctgcaaatgaacagcctgagaggtgaggacacggcggtgtattactgtgcgagagtttattatggttcggggatttattataaaaaccgctactactacggtatggacgtctggggccaagggaccacggtcaccgtctcctcaggtggtggtggttctggcggcggcggctccggtggtggtggttcttcatatgagctgactcagccaccctcagggtcagtggccctgggacagacggccaggatcacctgtgggggaaacaaccttggaagtaaaaatgtgcactggtaccaacagaagccaggccaggcccctgtgctggtcatctatagaaatagcaaccggccctctgggatccctgagcgattctctggctccaactcggggaacacggccaccctgaccatcagcagagcccaggccggggatgaggctgactattactgtcaggtgtgggacagcagcactgtggtattcggcggtgggaccaagctgaccgtccta

SEQ ID NO: 1132 - DNA, 747 bp, Artificial Sequence
  Synthetic Polynucleotide
caggtgcagctggtggagtctgggggaggcctggtcaagcctggggggtccctgagactctcctgtgcagcctctggattcaccttcagtaacaatggcatgcactgggtccgccaggctccaggcaaggggctggagtgggtggcagtcatatcgtatgatggaagtaataaatactatgcggactccgtgaagggccgattcaccatctccagagacaattccaagaacacgctgtatctgcaaatgaacagcctgagagctgaggacacggctgtgtattactgtgcgaaagtttattatggttcggggatttattataaaaacaggtattactacgggatggacgtctggggccaagggaccacggtcaccgtctcctcaggtggtggtggttctggcggcggcggctccggtggtggtggttcttcatatgagctgactcagccaccctcagtgtcagtggccctgggacagacggccaggattacctgtgggggaaacagaattggaagtaaaaatgtgcactggtaccagcagaagccaggccaggcccctgtgttggtcatctatagggatagcaaccggccctctgggatccctgagcgattctctggctccaagtcggggaccacggccaccctgaccatcagcagagcccaagccggggatgaggctgagtattactgtcaggtgtgggacagcagcactgtggttttcggcggagggaccaagctgaccgtccta

SEQ ID NO: 1133 - DNA, 747 bp, Artificial Sequence
  Synthetic Polynucleotide
caggtgcagctggtggagtctgggggaggcgtggtccagcctgggaggtccctgagactctcctgtgcagcctctggattcaccttcagtaactatggctttcactgggtccgccagactccaggcaaggggctggagtgggtggcagttatatcatatgatggaagtaatagatactatgcagactccgtgaagggccgattcaccatctccagagacaattccaagaacacgctgtatctccaaatgaacagcctgagaggtgaggacacggcgctatattactgtgcgagagtttactatggttcggggacttattataaaaaccgctactactacggtatggacgtctggggccaagggaccacggtcaccgtctcctcaggtggtggtggttctggcggcggcggctccggtggtggtggttcttcatatgagctgacacagctaccttcagtgtcagtggccctgggacagacggccaggattacctgtgggggacacaacattggaagtaaaggtgtgcactggtaccagcagaagccaggccaggcccctgtgctggtcatctatagaaatagcaaccggccctctgggatccctgagcgattctctggctccaactcggggaacacggccaccctgaccatcagcagagcccaagccggggatgaggctgactattactgtcaggtgtgggacagcagcactgtggttttcggcggagggaccgagctgaccgtccta

SEQ ID NO: 1134 - DNA, 747 bp, Artificial Sequence
  Synthetic Polynucleotide
caggtgcagctggtggagtctgggggaggcgtggtccagcctgggaggtccctgagactctcctgtgcagcctctggattcaacttcagtaactatggcatgcactgggtccgccaggctccaggcaaggggctggaatgggtggcagttatatcatatgatggaagtaataaatattatgcagactccgtgaagggccgattcaccatctccagagacaattccaagaacacgctgtatctacaaatgaacagcctgagagctgaggacacggctgtgtatttctgtgcgagagtttactatggttcggggatttattataaaaaccgctattactacggtatggacgtctggggccaagggaccacggtcaccgtctcctcaggtggtggtggttctggcggcggcggctccggtggtggtggttcttcatatgagctgactcagccaccctcagtgtcagtggccctgggacagacggccaggattacctgtgggggacacaacattggaagtaaaggtgtgcactggtaccagcagaagccaggccaggcccctgtgctggtcatctatagaaatagcaaccggccctctgggatccctgagcgattctctggctccaactcggggaacacggccaccctgaccatcagcagagcccaagccggggatgaggctgactattactgtcaggtgtgggacagtagtactgtggttttcggcggaggcacccagctgaccgtccta

SEQ ID NO: 1135 - DNA, 747 bp, Artificial Sequence
  Synthetic Polynucleotide
caggtgcagctggtggagtctgggggagacttggtacagcctgggaggtccctgagactctcctgtgcagcgtctggattcaccttcagtaacaatggcatgcactgggtccgccaggctccaggcaagggactggagtgggtggcagttatttcaaatgatggcagtaataaatattatgcagattccgtgaggggccgattcaccatctccagagacaattccaagaacacgctgtatctgcaaatgaacagcctgagagctgaggacacggctgtgtattattgtgcgaaagtttactatggttcgggtatttattataaaaacaggtactactacgggatggacgtctggggccaagggaccacggtcaccgtctcctcaggtggtggtggttctggcggcggcggctccggtggtggtggttcttcatatgagctgactcagccactctcagtgtcagtggccctgggacagacggccaggattacctgtgggggaaacaacattggaagtaaaaatgtgcactggtaccagcagaagccaggccaggcccctgtgctggtcatctataggaatagcaaccggccctctgggatccctgagcgattctctggctccaactcggggaacacggccaccctgactcttagcagagtccaagccggggatgaggctgactattactgtcaggtgtgggacagcagcactgtggttttcggcggagggaccaagctgaccgtccta

SEQ ID NO: 1136 - DNA, 747 bp, Artificial Sequence
  Synthetic Polynucleotide
caggtgcagctggtggagtccgggggaggcgtggtccagcctgggaggtccctgagactctcctgtgcagtctctggattcaacttcagtaacaatggcatgcactgggtccgccaggctccaggcaagggactggagtgggtggcagttatttcaaatgatggcagtaataaatattatgcagattccgtgaggggccgattcaccatctccagagacaattccaagaacacactgtatctgcaaatggacagcctgagaactgaggacacggctgtgtattactgtgcgaaagtttactatggttcgggtatttattataaaaacaggtactactacggtatggacgtctggggccaagggaccacggtcaccgtctcctcaggtggtggtggttctggcggcggcggctccggtggtggtggttcttcatatgagctgactcagccaccctcagtgtcagtggccctgggacagacggccaggcttacctgtgagggaaacaacattggaagtaaaaatgtgcactggtaccagcagaagccaggccaggcccctgtgttggtcatctatagggatagcaaccggccctctgggatccctgagcgcttctctggctccaagtcggggaacacggccaccctggccatcagcagagcccaagccggggatgagtctgactattactgtcaggtgtgggacagcagtgccgtggtattcggcggaggcaccaagctgaccgtccta

SEQ ID NO: 1137 - DNA, 747 bp, Artificial Sequence
  Synthetic Polynucleotide
caggtgcagctggtggagtccgggggaggcgtggtccagcctgggaggtccctgagactctcctgtgcagcctctggattcaccttcagtagctctggcatgcactgggtccgccaggctccaggcaaggggctggagtgggtggcagttatatcaaatgatggaagtaataaatactatgcagactccgtgaagggccgattcaccatctccagagacaattccaagaacacgctgtatctgcaaatgaacagcctgagagctgaggacacggctgtgtattactgtgcgaaagtttactatggttcggggatttattataaaaataactactattacggtatggacgtctggggccaagggaccacggtcaccgtctcctcaggtggtggtggttctggcggcggcggctccggtggtggtggttcttcatatgagctgactcagccaccctcagtgtcagtggccctgggacagacggccaggattacctgtgggggaaacaacattggaagtaaaaatgtgcactggtaccagcagaagccaggccaggcccctgtgctggccatctataggaatagcaaccggccctctgggatccctgagcgattcactggctccaactcggggaacacggccaccctgaccatcagcgggacccaggctatggatgaggctgactattactgtcaggcgtgggacagcagcactgtggtattcggcggagggaccaagctgaccgtccta

SEQ ID NO: 1138 - DNA, 747 bp, Artificial Sequence
  Synthetic Polynucleotide
caggtgcagctggtggagtctgggggaggcgtggtccagcctgggaggtccctgagactctcctgtgcagcctctggattcaacttcagtaactatggcatgcactgggtccgccaggctccaggcaaggggctggaatgggtggcagttatatcatatgatggaagtaataaatattatgcagactccgtgaagggccgattcaccatctccagagacaattccaagaacacgctgtatctacaaatgaacagcctgagagctgaggacacggctgtgtatttctgtgcgagagtttactatggttcggggatttattataaaaagagatactactacggtatggacgtctggggccaagggaccacggtcaccgtctcctcaggtggtggtggttctggcggcggcggctccggtggtggtggttcttcatatgagctgactcagccaccctcagtgtcagtggccctgggacagacggccaggattacctgtgggggaaacaacattggaagtcaaaatgtgcactggtaccagcagaagccaggccaggcccctgtgctggtcatctatagggatagcaaccggccctctgggatccctgagcgcttctctggctccaagtcggggaacacggccaccctggccatcagcagagcccaagccggggatgagtctgactattactgtcaggtgtgggacagcagtgccgtggtattcggcggaggcacccagctgaccgtccta

SEQ ID NO: 1139 - DNA, 747 bp, Artificial Sequence
  Synthetic Polynucleotide
caggtgcagctggtggagtccgggggaggcgtggtccagcctgggaggtccctgagactctcctgtgcagcctctggattcaccctcagtagctctggcatgcactgggtccgccaggctccaggcaaggggctggagtgggtggcagttatatcaaatgatggaagtaataaatactatgcggactccgtgaagggccggttcaccatctccagagacgattccaagaacacactgtatctgcaaatggacagcctgagaactgaggacacggctgtgtattactgtgcgaaagtttactatggttcgggtatttattataaaaacaggtactactacgggatggacgtctggggccaagggaccacggtcaccgtctcctcaggtggtggtggttctggcggcggcggctccggtggtggtggttcttcatatgagctgactcagccaccctcagtgtcagtggccctgggacagacggccaggatttcctgtgggggaaacaacattggaagtaaaaatgtgcactggtaccagcagaagccaggccaggcccctgtgctggtcatgtatagggatagcaaccggccctcagggatccctgagcgattctctggctccaactctgggaacacagccactctgaccatcagcgggacccaggctatggatgaggctgactattactgtcaggcgtgggacagcggcactgtggtattcggcggagggaccaagctgaccgtccta

SEQ ID NO: 1140 - DNA, 747 bp, Artificial Sequence
  Synthetic Polynucleotide
caggtgcagctggtggagtctgggggaggcgtggtccagcctgggaggtccctgagactctcctgtgcagcctctggattcaacttcagtaactatggcatgcactgggtccgccaggctccaggcaaggggctggaatgggtggcagttatatcatatgatggaagtaataaatattatgcagactccgtgaagggccgattcaccatctccagagacaattccaagaacacgctgtatctacaaatgaacagcctgagagctgaggacacggctgtgtatttctgtgcgagagtttactatggttcggggatttattataaaaagagatactactacggtatggacgtctggggccaagggaccacggtcaccgtctcctcaggtggtggtggttctggcggcggcggctccggtggtggtggttcttcatatgagctgactcagccaccctcagtgtcagtggccctgggacagacggccagaattacctgtgggggaaacaacattggaggtaaaaatgtgcactggtaccagcagaagccaggccaggcccctgtgctggtcatctatagggatagcaaccggccctctgggatccctgagcgattctctggctccaagtcggggaacacggccaccctgaccatcagcagagcccaagccggggatgagtctgactattactgtcaggtgtgggacagcagcactgtggtattcggcggaggcacccagctgaccgtccta

SEQ ID NO: 1141 - DNA, 747 bp, Artificial Sequence
  Synthetic Polynucleotide
caggtgcagctggtggagtctgggggaggcgtggtccagcctgggaggtccctgagactctcctgtgtagtctctggattcaacttcagtaggaatggcatgcactgggtccgccaggttccaggcagggggctagattgggtggcagttatatcaaatgatggaagtaataaatactatgcagactccgtgaagggccgattcaccatctccagagacaattccaagaacacgctgtatctgcaaatgaacagcctgagagctgaggacacggctgtgtattactgtgcgaaagtttactatggttcggggatttattataaaaataactactattacggtatggacgtctggggccaagggaccacggtcaccgtctcctcaggtggtggtggttctggcggcggcggctccggtggtggtggttcttcatatgagctgactcagccactctcagtgtcagtggccctgggacagacggccaggattacctgtgggggaaacaacattggaagtaaaaatgtgcactggtaccagcagaagccaggccaggcccctgtgctggtcatctatagaaatagcaaccggccctctgggatccctgagcgattctctggctccaactcggggaacacggccaccctgaccatcagcagagcccaggccggggatgaggctgactattactgtcaggtgtgggacagcagcactgtggttttcggcggtgggaccaagctgaccgtccta

SEQ ID NO: 1142 - DNA, 747 bp, Artificial Sequence
  Synthetic Polynucleotide
caggtgcagctggtggagtccgggggaggcttggtcaagcctggagggtccctgagactctcctgtgcagcctctggattcaacttcagtaggaatggcatgcactgggtccgccaggttccaggcagggggctagattgggtggcagttatatcaaatgatggaagtaataaatactatgcagactccgtgaagggccgattcaccatctccagagacaattccaagaacacgctgtatctgcaaatgaacagcctgagagctgaggacacggctgtgtattactgtgcgaaagtttactatggttcggggatttattataaaaataactactactacggtatggacgtctggggccaagggaccacggtcaccgtctcctcaggtggtggtggttctggcggcggcggctccggtggtggtggttcttcatatgagctgactcagccaccctcagtgtcagtggccctgggacagacggccaggatttcctgtgggggaaacaacattgaaagtaaaaatgtgcactggtaccagcagaagccaggccaggcccctgtgttggtcatctatagggatagcaaccggccctctgggatccctgagcgattctctggctccaagtcggggaccacggccaccctgaccatcagcagagcccaagccggggatgaggctgagtattactgtcaggtgtgggacagcagcactgtggttttcggcggaggcacccagctgaccgtccta

SEQ ID NO: 1143 - DNA, 1404 bp, Artificial Sequence
  Synthetic Polynucleotide
atggacatgagggtgcccgctcagctcctggggctcctgctgctgtggctgagaggtgcgcgctgtgaggtgcagctggtggagtctgggggaggcttggtaaagcctggggggtccctgagactctcctgtgcagcctctggatttactttcagtaacgcccggatgggctgggtccgccaggctccagggaaggggctggagtgggttggccgtattaaaagcaaaactgaaggtgggacaagagactacgctgcacccgtgaaaggcagattcaccatctcaagagatgattcaaaaaacacgctgtatctgcaaatgaacagcctgaaaaccgaggacacagccgtgtattattgtacctcgtatagtggggtctggggccaagggacaatggtcaccgtgtcttcagcctccaccaagggcccatcggtcttccccctggcaccctcctccaagagcacctctgggggcacagcggccctgggctgcctggtcaaggactacttccccgaaccggtgacggtgtcgtggaactcaggcgccctgaccagcggcgtgcacaccttcccggctgtcctacagtcctcaggactctactccctcagcagcgtggtgaccgtgccctccagcagcttgggcacccagacctacatctgcaacgtgaatcacaagcccagcaacaccaaggtggacaagaaagttgagcccaaatcttgtgacaaaactcacacatgcccaccgtgcccagcacctgaactcctggggggaccgtcagtcttcctcttccccccaaaacccaaggacaccctcatgatctcccggacccctgaggtcacatgcgtggtggtggacgtgagccacgaagaccctgaggtcaagttcaactggtacgtggacggcgtggaggtgcataatgccaagacaaagccgcgggaggagcagtacaacagcacgtaccgtgtggtcagcgtcctcaccgtcctgcaccaggactggctgaatggcaaggagtacaagtgcaaggtgtccaacaaagccctcccagcccccatcgagaaaaccatctccaaagccaaagggcagccccgagaaccacaggtgtacaccctgcccccatcccgggaggagatgaccaagaaccaggtcagcctgacctgcctggtcaaaggcttctatcccagcgacatcgccgtggagtgggagagcaatgggcagccggagaacaactacaagaccacgcctcccgtgctggactccgacggctccttcttcctctatagcaagctcaccgtggacaagagcaggtggcagcaggggaacgtcttctcatgctccgtgatgcatgaggctctgcacaaccactacacgcagaagagcctctccctgtctccgggcaaatag

SEQ ID NO: 1144 - DNA, 729 bp, Artificial Sequence
  Synthetic Polynucleotide
atggacatgagggtgcccgctcagctcctggggctcctgctgctgtggctgagaggtgcgcgctgtgacatcgtgatgacccagtctccagactccctggctgtgtctctgggcgagagggccaccatcaactgcaagtccagccagagtgttttatacagttccaacaatagaaactacttagcttggtaccatcagaaaccaggacagtctcctaagctgctcatttcctgggcatctacccgggaatccggggtccctgaccgattcagtggcagcgggtctgggacagatttcactctcaccatcaacagcctgcaggctgaagatgtggcagtttattactgtcaacaatattatagtattccgatcactttcggcggagggaccaaggtggagatcaaacgaacggtggctgcaccatctgtcttcatcttcccgccatctgatgagcagttgaaatctggaactgcctctgttgtgtgcctgctgaataacttctatcccagagaggccaaagtacagtggaaggtggataacgccctccaatcgggtaactcccaggagagtgtcacagagcaggacagcaaggacagcacctacagcctcagcagcaccctgacgctgagcaaagcagactacgagaaacacaaagtctacgcctgcgaagtcacccatcagggcctgagctcgcccgtcacaaagagcttcaacaggggagagtgttag

SEQ ID NO: 1145 - DNA, 1443 bp, Artificial Sequence
  Synthetic Polynucleotide
atggacatgagggtgcccgctcagctcctggggctcctgctgctgtggctgagaggtgcgcgctgtcaggtgcagctggtggagtccgggggaggcgtggtccagcctgggaggtccctgagactctcctgtgcagcctctggattcaccttcagtaactatggctttcactgggtccgccagactccaggcaaggggctggagtgggtggcagttatctcatatgatggaagtaatagatactatgcaagctccgtgaagggccgattcaccatctccagagacaattccaagaacacgctgtatctccaaatgaacagcctgagaggtgaggacacggcgctatattactgtgcgagagtttactatggttcggggacttattataaaaaccgctactactacggtatggacgtctggggccaagggaccacggtcaccgtgtcctcagcctccaccaagggcccatcggtcttccccctggcaccctcctccaagagcacctctgggggcacagcggccctgggctgcctggtcaaggactacttccccgaaccggtgacggtgtcgtggaactcaggcgccctgaccagcggcgtgcacaccttcccggctgtcctacagtcctcaggactctactccctcagcagcgtggtgaccgtgccctccagcagcttgggcacccagacctacatctgcaacgtgaatcacaagcccagcaacaccaaggtggacaagaaagttgagcccaaatcttgtgacaaaactcacacatgcccaccgtgcccagcacctgaactcctggggggaccgtcagtcttcctcttccccccaaaacccaaggacaccctcatgatctcccggacccctgaggtcacatgcgtggtggtggacgtgagccacgaagaccctgaggtcaagttcaactggtacgtggacggcgtggaggtgcataatgccaagacaaagccgcgggaggagcagtacaacagcacgtaccgtgtggtcagcgtcctcaccgtcctgcaccaggactggctgaatggcaaggagtacaagtgcaaggtgtccaacaaagccctcccagcccccatcgagaaaaccatctccaaagccaaagggcagccccgagaaccacaggtgtacaccctgcccccatcccgggaggagatgaccaagaaccaggtcagcctgacctgcctggtcaaaggcttctatcccagcgacatcgccgtggagtgggagagcaatgggcagccggagaacaactacaagaccacgcctcccgtgctggactccgacggctccttcttcctctatagcaagctcaccgtggacaagagcaggtggcagcaggggaacgtcttctcatgctccgtgatgcatgaggctctgcacaaccactacacgcagaagagcctctccctgtctccgggcaaatag

SEQ ID NO: 1146 - DNA, 696 bp, Artificial Sequence
  Synthetic Polynucleotide
atggcctgggctctgctgctcctcaccctcctcactcagggcacagggtcctgggcctcatatgagctgactcagccaccctcagtgtcagtggccctgggacagacggccaggattacctgtgggggacacaacattggaagtaaaggtgtgcactggtaccagcagaagccaggccaggcccctgtactggtcatctatagagccgccaaccggccctctgggatccctgagcgattctctggctccaactctgggaacacagccactctgaccatcagcgggacccaggctggcgatgaggctgactattactgtcaggcgttcgacgccggcactgtggtattcggcggaggcacccagctgaccgtcctaggtcagcccaaggctgcaccctcggtcactctgttcccgccctcctctgaggagcttcaagccaacaaggccacactggtgtgtctcatcagtgacttctacccgggagccgtgacagtggcctggaaggcagatagcagccccgtcaaggcgggagtggaaaccaccacaccctccaaacaaagcaacaacaagtacgcggccagcagctatctgagcctgacgcctgagcagtggaagtcccacagaagctacagctgccaggtcacgcatgaagggagcaccgtggagaagacagtggcccctacagaatgttcatag

SEQ ID NO: 1147 - DNA, 1443 bp, Artificial Sequence
  Synthetic Polynucleotide
atggacatgagggtgcccgctcagctcctggggctcctgctgctgtggctgagaggtgcgcgctgtcaggtgcagctggtggagtccgggggaggcgtggtccagcctgggaggtccctgagactctcctgtgcagcctctggattcaccttcagtaactatggctttcactgggtccgccagactccaggcaaggggctggagtgggtggcagttatctcatatgccggaagtaatagatactatgcagcctccgtgaagggccgattcaccatctccagagacaattccaagaacacgctgtatctccaaatgaacagcctgagaggtgaggacacggcgctatattactgtgcgagagtttactatggttcggggacttattataaaaaccgctactactacggtatggacgtctggggccaagggaccacggtcaccgtgtcctcagcctccaccaagggcccatcggtcttccccctggcaccctcctccaagagcacctctgggggcacagcggccctgggctgcctggtcaaggactacttccccgaaccggtgacggtgtcgtggaactcaggcgccctgaccagcggcgtgcacaccttcccggctgtcctacagtcctcaggactctactccctcagcagcgtggtgaccgtgccctccagcagcttgggcacccagacctacatctgcaacgtgaatcacaagcccagcaacaccaaggtggacaagaaagttgagcccaaatcttgtgacaaaactcacacatgcccaccgtgcccagcacctgaactcctggggggaccgtcagtcttcctcttccccccaaaacccaaggacaccctcatgatctcccggacccctgaggtcacatgcgtggtggtggacgtgagccacgaagaccctgaggtcaagttcaactggtacgtggacggcgtggaggtgcataatgccaagacaaagccgcgggaggagcagtacaacagcacgtaccgtgtggtcagcgtcctcaccgtcctgcaccaggactggctgaatggcaaggagtacaagtgcaaggtgtccaacaaagccctcccagcccccatcgagaaaaccatctccaaagccaaagggcagccccgagaaccacaggtgtacaccctgcccccatcccgggaggagatgaccaagaaccaggtcagcctgacctgcctggtcaaaggcttctatcccagcgacatcgccgtggagtgggagagcaatgggcagccggagaacaactacaagaccacgcctcccgtgctggactccgacggctccttcttcctctatagcaagctcaccgtggacaagagcaggtggcagcaggggaacgtcttctcatgctccgtgatgcatgaggctctgcacaaccactacacgcagaagagcctctccctgtctccgggcaaatag

SEQ ID NO: 1148 - DNA, 696 bp, Artificial Sequence
  Synthetic Polynucleotide
atggcctgggctctgctgctcctcaccctcctcactcagggcacagggtcctgggcctcatatgagctgactcagccaccctcagtgtcagtggccctgggacagacggccaggattacctgtgggggacacaacattggaagtaaaggtgtgcactggtaccagcagaagccaggccaggcccctgtactggtcatctatagacagagcaaccggccctctgggatccctgagcgattctctggctccaactctgggaacacagccactctgaccatcagcgggacccaggctgaagatgaggctgactattactgtcaggcgttcgacgccggcactgtggtattcggcggaggcacccagctgaccgtcctaggtcagcccaaggctgcaccctcggtcactctgttcccgccctcctctgaggagcttcaagccaacaaggccacactggtgtgtctcatcagtgacttctacccgggagccgtgacagtggcctggaaggcagatagcagccccgtcaaggcgggagtggaaaccaccacaccctccaaacaaagcaacaacaagtacgcggccagcagctatctgagcctgacgcctgagcagtggaagtcccacagaagctacagctgccaggtcacgcatgaagggagcaccgtggagaagacagtggcccctacagaatgttcatag

SEQ ID NO: 1149 - DNA, 1443 bp, Artificial Sequence
  Synthetic Polynucleotide
atggacatgagggtgcccgctcagctcctggggctcctgctgctgtggctgagaggtgcgcgctgtcaggtgcagctggtggagtccgggggaggcgtggtccagcctgggaggtccctgagactctcctgtgcagcctctggattcaccttcagtaactatggctttcactgggtccgccagactccaggcaaggggctggagtgggtggcagttatctcatatagcggaagtaatagatactatgcagactccgtgaagggccgattcaccatctccagagacaattccaagaacacgctgtatctccaaatgaacagcctgagaggtgaggacacggcgctatattactgtgcgagagtttactatggttcggggacttattataaaaaccgctactactacggtatggacgtctggggccaagggaccacggtcaccgtgtcctcagcctccaccaagggcccatcggtcttccccctggcaccctcctccaagagcacctctgggggcacagcggccctgggctgcctggtcaaggactacttccccgaaccggtgacggtgtcgtggaactcaggcgccctgaccagcggcgtgcacaccttcccggctgtcctacagtcctcaggactctactccctcagcagcgtggtgaccgtgccctccagcagcttgggcacccagacctacatctgcaacgtgaatcacaagcccagcaacaccaaggtggacaagaaagttgagcccaaatcttgtgacaaaactcacacatgcccaccgtgcccagcacctgaactcctggggggaccgtcagtcttcctcttccccccaaaacccaaggacaccctcatgatctcccggacccctgaggtcacatgcgtggtggtggacgtgagccacgaagaccctgaggtcaagttcaactggtacgtggacggcgtggaggtgcataatgccaagacaaagccgcgggaggagcagtacaacagcacgtaccgtgtggtcagcgtcctcaccgtcctgcaccaggactggctgaatggcaaggagtacaagtgcaaggtgtccaacaaagccctcccagcccccatcgagaaaaccatctccaaagccaaagggcagccccgagaaccacaggtgtacaccctgcccccatcccgggaggagatgaccaagaaccaggtcagcctgacctgcctggtcaaaggcttctatcccagcgacatcgccgtggagtgggagagcaatgggcagccggagaacaactacaagaccacgcctcccgtgctggactccgacggctccttcttcctctatagcaagctcaccgtggacaagagcaggtggcagcaggggaacgtcttctcatgctccgtgatgcatgaggctctgcacaaccactacacgcagaagagcctctccctgtctccgggcaaatag

SEQ ID NO: 1150 - DNA, 696 bp, Artificial Sequence
  Synthetic Polynucleotide
atggcctgggctctgctgctcctcaccctcctcactcagggcacagggtcctgggcctcatatgagctgactcagccaccctcagtgtcagtggccctgggacagacggccaggattacctgtgggggacacaacattggaagtaaaggtgtgcactggtaccagcagaagccaggccaggcccctgtactggtcatctatagacagagcaaccggccctctgggatccctgagcgattctctggctccaactctgggaacacagccactctgaccatcagcgggacccaggctggcgatgaggctgactattactgtcaggcgttcgacgccggcactgtggtattcggcggaggcacccagctgaccgtcctaggtcagcccaaggctgcaccctcggtcactctgttcccgccctcctctgaggagcttcaagccaacaaggccacactggtgtgtctcatcagtgacttctacccgggagccgtgacagtggcctggaaggcagatagcagccccgtcaaggcgggagtggaaaccaccacaccctccaaacaaagcaacaacaagtacgcggccagcagctatctgagcctgacgcctgagcagtggaagtcccacagaagctacagctgccaggtcacgcatgaagggagcaccgtggagaagacagtggcccctacagaatgttcatag

SEQ ID NO: 1151 - DNA, 696 bp, Artificial Sequence
  Synthetic Polynucleotide
atggcctgggctctgctgctcctcaccctcctcactcagggcacagggtcctgggcctcctatgaactgactcagccactctcagtgtcagtggccctgggacagacggccaggattacctgtgggggacacaacattggaagtaaaggtgtgcactggtaccagcagaagccaggccaggcccctgtgctggtcatctatagaaatagcaaccggccctctgggatccctgagcgattctctggctccaactcggggaacacggccaccctgaccatcagcagagcccaagccggggatgaggctgactattactgtcaggtgtgggacatcagcactgtggttttcggcggagggaccgagctgaccgtcctaggtcagcccaaggctgcaccctcggtcactctgttcccgccctcctctgaggagcttcaagccaacaaggccacactggtgtgtctcatcagtgacttctacccgggagccgtgacagtggcctggaaggcagatagcagccccgtcaaggcgggagtggaaaccaccacaccctccaaacaaagcaacaacaagtacgcggccagcagctatctgagcctgacgcctgagcagtggaagtcccacagaagctacagctgccaggtcacgcatgaagggagcaccgtggagaagacagtggcccctacagaatgttcatag

SEQ ID NO: 1152 - protein, 1443 aa, Artificial Sequence
  Synthetic Polypeptide
ATGGACATGAGGGTGCCCGCTCAGCTCCTGGGGCTCCTGCTGCTGTGGCTGAGAGGTGCGCGCTGTCAGGTGCAGCTGGTGGAGTCTGGGGGAGGCGTGGCCCAGCCTGGGAGGTCCCTGAGACTCTCCTGTGCAGCCTCTGGATTCAACTTCAGTAACTGTGGCATGCACTGGGTCCGCCAGGCTCCAGGCAAGGGGCTGGAGTGGGTGGCAGTTATATCATATGATGGAGGTAATAAATATCATGCGGACTCCGTGAAGGGCCGGTTCACCATCTCCAGAGACGATTCCAAGAACACACTGTATCTGCAAATGGACAGCCTGAGAACTGAGGACACGGCTGTGTATTACTGTGCGAAAGTTTACTATGGTTCGGGTATTTATTATAAAAACAGGTACTACTACGGGATGGACGTCTGGGGCCAAGGGACCACGGTCACCGTCTCCTCAGCCTCCACCAAGGGCCCATCGGTCTTCCCCCTGGCACCCTCCTCCAAGAGCACCTCTGGGGGCACAGCGGCCCTGGGCTGCCTGGTCAAGGACTACTTCCCCGAACCGGTGACGGTGTCGTGGAACTCAGGCGCCCTGACCAGCGGCGTGCACACCTTCCCGGCTGTCCTACAGTCCTCAGGACTCTACTCCCTCAGCAGCGTGGTGACCGTGCCCTCCAGCAGCTTGGGCACCCAGACCTACATCTGCAACGTGAATCACAAGCCCAGCAACACCAAGGTGGACAAGAAAGTTGAGCCCAAATCTTGTGACAAAACTCACACATGCCCACCGTGCCCAGCACCTGAACTCCTGGGGGGACCGTCAGTCTTCCTCTTCCCCCCAAAACCCAAGGACACCCTCATGATCTCCCGGACCCCTGAGGTCACATGCGTGGTGGTGGACGTGAGCCACGAAGACCCTGAGGTCAAGTTCAACTGGTACGTGGACGGCGTGGAGGTGCATAATGCCAAGACAAAGCCGCGGGAGGAGCAGTACAACAGCACGTACCGTGTGGTCAGCGTCCTCACCGTCCTGCACCAGGACTGGCTGAATGGCAAGGAGTACAAGTGCAAGGTGTCCAACAAAGCCCTCCCAGCCCCCATCGAGAAAACCATCTCCAAAGCCAAAGGGCAGCCCCGAGAACCACAGGTGTACACCCTGCCCCCATCCCGGGAGGAGATGACCAAGAACCAGGTCAGCCTGACCTGCCTGGTCAAAGGCTTCTATCCCAGCGACATCGCCGTGGAGTGGGAGAGCAATGGGCAGCCGGAGAACAACTACAAGACCACGCCTCCCGTGCTGGACTCCGACGGCTCCTTCTTCCTCTATAGCAAGCTCACCGTGGACAAGAGCAGGTGGCAGCAGGGGAACGTCTTCTCATGCTCCGTGATGCATGAGGCTCTGCACAACCACTACACGCAGAAGAGCCTCTCCCTGTCTCCGGGCAAATAG

SEQ ID NO: 1153 - DNA, 696 bp, Artificial Sequence
  Synthetic Polynucleotide
atggcctgggctctgctgctcctcaccctcctcactcagggcacagggtcctgggcctcctatgagctgactcagccactctcagtgtcagtggccctgggacagacggccaggattacctgtgggggacacaacattggaagtaaaggtgtgcactggtaccagcagaagccaggccaggcccctgtgctggtcatctatagaaatagcaaccggccctctgggatccctgagcgattctctggctccaactcggggaaaacggccaccctgaccatcagcagagcccaagccggggatgaggctgactattactgtcaggtgtgggacagcagcactgtggttttcggcggagggaccgagctgaccgtcctaggtcagcccaaggctgcaccctcggtcactctgttcccgccctcctctgaggagcttcaagccaacaaggccacactggtgtgtctcatcagtgacttctacccgggagccgtgacagtggcctggaaggcagatagcagccccgtcaaggcgggagtggaaaccaccacaccctccaaacaaagcaacaacaagtacgcggccagcagctatctgagcctgacgcctgagcagtggaagtcccacagaagctacagctgccaggtcacgcatgaagggagcaccgtggagaagacagtggcccctacagaatgttcatag

SEQ ID NO: 1154 - DNA, 1443 bp, Artificial Sequence
  Synthetic Polynucleotide
atggacatgagggtgcccgctcagctcctggggctcctgctgctgtggctgagaggtgcgcgctgtcaggtgcagctggtggagtctgggggaggcgtggcccagcctgggaggtccctgagactctcctgtgcagcctctggattcaacttcagtaactgtggcatgcactgggtccgccaggctccaggcaaggggctggagtgggtggcagttatatcatatgatggaggtaataaatattatgcggactccgtgaagggccggttcaccatctccagagacgattccaagaacacactgtatctgcaaatggacagcctgagaactgaggacacggctgtgtattactgtgcgaaagtttactatggttcgggtatttattataaaaacaggtattactacgggatggacgtctggggccaagggaccacggtcaccgtctcctcagcctccaccaagggcccatcggtcttccccctggcaccctcctccaagagcacctctgggggcacagcggccctgggctgcctggtcaaggactacttccccgaaccggtgacggtgtcgtggaactcaggcgccctgaccagcggcgtgcacaccttcccggctgtcctacagtcctcaggactctactccctcagcagcgtggtgaccgtgccctccagcagcttgggcacccagacctacatctgcaacgtgaatcacaagcccagcaacaccaaggtggacaagaaagttgagcccaaatcttgtgacaaaactcacacatgcccaccgtgcccagcacctgaactcctggggggaccgtcagtcttcctcttccccccaaaacccaaggacaccctcatgatctcccggacccctgaggtcacatgcgtggtggtggacgtgagccacgaagaccctgaggtcaagttcaactggtacgtggacggcgtggaggtgcataatgccaagacaaagccgcgggaggagcagtacaacagcacgtaccgtgtggtcagcgtcctcaccgtcctgcaccaggactggctgaatggcaaggagtacaagtgcaaggtgtccaacaaagccctcccagcccccatcgagaaaaccatctccaaagccaaagggcagccccgagaaccacaggtgtacaccctgcccccatcccgggaggagatgaccaagaaccaggtcagcctgacctgcctggtcaaaggcttctatcccagcgacatcgccgtggagtgggagagcaatgggcagccggagaacaactacaagaccacgcctcccgtgctggactccgacggctccttcttcctctatagcaagctcaccgtggacaagagcaggtggcagcaggggaacgtcttctcatgctccgtgatgcatgaggctctgcacaaccactacacgcagaagagcctctccctgtctccgggcaaatag

SEQ ID NO: 1155 - DNA, 696 bp, Artificial Sequence
  Synthetic Polynucleotide
atggcctgggctctgctgctcctcaccctcctcactcagggcacagggtcctgggcctcctatgagctgactcagccactctcagtgtcagtggccctgggacagacggccaggattacctgtgggggaaacaacattggaagtaaaaatgtgcactggtaccagaagaggccaggccaggcccctgtgctggtcatctatagggatagcaaccggccctctgggatccctgagcgattctctggctccaagtcggggaacacggccaccctgaccatcagcagagcccaagccggggatgaggctgactattactgtcaggtgtgggacagcaacactgtggttttcggcggagggaccaacctgaccgtcctaggtcagcccaaggctgcaccctcggtcactctgttcccgccctcctctgaggagcttcaagccaacaaggccacactggtgtgtctcatcagtgacttctacccgggagccgtgacagtggcctggaaggcagatagcagccccgtcaaggcgggagtggaaaccaccacaccctccaaacaaagcaacaacaagtacgcggccagcagctatctgagcctgacgcctgagcagtggaagtcccacagaagctacagctgccaggtcacgcatgaagggagcaccgtggagaagacagtggcccctacagaatgttcatag

SEQ ID NO: 1156 - DNA, 1443 bp, Artificial Sequence
  Synthetic Polynucleotide
atggacatgagggtgcccgctcagctcctggggctcctgctgctgtggctgagaggtgcgcgctgtcaggtgcagctggtggagtctgggggaggcgtggtccagcctgggaggtccctgagactctcctgtgtagtctctggattcaacttcagtaacaatggcatgcactgggtccgccaggctccaggcaagggactggagtgggtggcagttatttcaaatgatggcagtaataaatattatgcagattccgtgaggggccgattcaccatctccagagacaattccaagaacacgctgtatctgcaaatgaacagcctgagagctgaggacacggctgtgtattcctgtgcgaaagtttactatggttcgggaatttattacaaaaataactactactacggtatggacgtctggggccaagggaccacggtcaccgtctcctcagcctccaccaagggcccatcggtcttccccctggcaccctcctccaagagcacctctgggggcacagcggccctgggctgcctggtcaaggactacttccccgaaccggtgacggtgtcgtggaactcaggcgccctgaccagcggcgtgcacaccttcccggctgtcctacagtcctcaggactctactccctcagcagcgtggtgaccgtgccctccagcagcttgggcacccagacctacatctgcaacgtgaatcacaagcccagcaacaccaaggtggacaagaaagttgagcccaaatcttgtgacaaaactcacacatgcccaccgtgcccagcacctgaactcctggggggaccgtcagtcttcctcttccccccaaaacccaaggacaccctcatgatctcccggacccctgaggtcacatgcgtggtggtggacgtgagccacgaagaccctgaggtcaagttcaactggtacgtggacggcgtggaggtgcataatgccaagacaaagccgcgggaggagcagtacaacagcacgtaccgtgtggtcagcgtcctcaccgtcctgcaccaggactggctgaatggcaaggagtacaagtgcaaggtgtccaacaaagccctcccagcccccatcgagaaaaccatctccaaagccaaagggcagccccgagaaccacaggtgtacaccctgcccccatcccgggaggagatgaccaagaaccaggtcagcctgacctgcctggtcaaaggcttctatcccagcgacatcgccgtggagtgggagagcaatgggcagccggagaacaactacaagaccacgcctcccgtgctggactccgacggctccttcttcctctatagcaagctcaccgtggacaagagcaggtggcagcaggggaacgtcttctcatgctccgtgatgcatgaggctctgcacaaccactacacgcagaagagcctctccctgtctccgggcaaatag

SEQ ID NO: 1157 - DNA, 696 bp, Artificial Sequence
  Synthetic Polynucleotide
atggcctgggctctgctgctcctcaccctcctcactcagggcacagggtcctgggcctcctatgagctgactcagccactctcagtgtcagtggccctgggacagacggccaggattacctgtgggggaaacaacattggaagtaaaaatgtgcactggtaccagcagaaggcaggccaggcccctgtgcaggtcatctatagaaatagcaaccggccctctgggatccctgagcgattctctggctccaactcggggaacacggccaccctgaccatcagcagagcccaggccggggatgaggctgactattactgtcaggtgtgggacagcagcactgtggttttcggcggtgggaccaagctgaccgtcctaggtcagcccaaggctgcaccctcggtcactctgttcccgccctcctctgaggagcttcaagccaacaaggccacactggtgtgtctcatcagtgacttctacccgggagccgtgacagtggcctggaaggcagatagcagccccgtcaaggcgggagtggaaaccaccacaccctccaaacaaagcaacaacaagtacgcggccagcagctatctgagcctgacgcctgagcagtggaagtcccacagaagctacagctgccaggtcacgcatgaagggagcaccgtggagaagacagtggcccctacagaatgttcatag

SEQ ID NO: 1158 - DNA, 1443 bp, Artificial Sequence
  Synthetic Polynucleotide
atggacatgagggtgcccgctcagctcctggggctcctgctgctgtggctgagaggtgcgcgctgtcaggtgcagctggtggagtctgggggaggcgtggtccagcctgggaggtccctgagactctcctgtgcagcctctggattcaacttcaatacctatggcatgcactgggtccgccaggctccaggcaaggggctggagtgggtggcagttatatcatatgatggaagtaataaatattatgcagactccgtgaagggccgattcaccatctccagagacaattccaagagcacgctgtatctgcaaatgaacagcctgagagctgaggacacggctgtgtattactgtgcgagagtttactatggttcggggagttattataaaaagaattactactacggtatggacgtctggggccaagggaccacggtcaccgtctcctcagcctccaccaagggcccatcggtcttccccctggcaccctcctccaagagcacctctgggggcacagcggccctgggctgcctggtcaaggactacttccccgaaccggtgacggtgtcgtggaactcaggcgccctgaccagcggcgtgcacaccttcccggctgtcctacagtcctcaggactctactccctcagcagcgtggtgaccgtgccctccagcagcttgggcacccagacctacatctgcaacgtgaatcacaagcccagcaacaccaaggtggacaagaaagttgagcccaaatcttgtgacaaaactcacacatgcccaccgtgcccagcacctgaactcctggggggaccgtcagtcttcctcttccccccaaaacccaaggacaccctcatgatctcccggacccctgaggtcacatgcgtggtggtggacgtgagccacgaagaccctgaggtcaagttcaactggtacgtggacggcgtggaggtgcataatgccaagacaaagccgcgggaggagcagtacaacagcacgtaccgtgtggtcagcgtcctcaccgtcctgcaccaggactggctgaatggcaaggagtacaagtgcaaggtgtccaacaaagccctcccagcccccatcgagaaaaccatctccaaagccaaagggcagccccgagaaccacaggtgtacaccctgcccccatcccgggaggagatgaccaagaaccaggtcagcctgacctgcctggtcaaaggcttctatcccagcgacatcgccgtggagtgggagagcaatgggcagccggagaacaactacaagaccacgcctcccgtgctggactccgacggctccttcttcctctatagcaagctcaccgtggacaagagcaggtggcagcaggggaacgtcttctcatgctccgtgatgcatgaggctctgcacaaccactacacgcagaagagcctctccctgtctccgggcaaatag

SEQ ID NO: 1159 - DNA, 696 bp, Artificial Sequence
  Synthetic Polynucleotide
atggcctgggctctgctgctcctcaccctcctcactcagggcacagggtcctgggcctcctatgagctgactcagccactctcagtgtcagtggccctgggacagacggccaggattacctgtgggggaaacaacattggaggtaaaaatgtgcactggtaccagcagaagccaggccaggcccctgtgctggtcatctatagggatagcaaccggccctctgggatccctgagcgattctctggctccaagtcggggaacacggccaccctgaccatcagcagagcccaagccggggatgagtctgactattactgtcaggtttgggacagcagcactgtggtattcggcggagggaccacgctgaccgtcctaggtcagcccaaggctgcaccctcggtcactctgttcccgccctcctctgaggagcttcaagccaacaaggccacactggtgtgtctcatcagtgacttctacccgggagccgtgacagtggcctggaaggcagatagcagccccgtcaaggcgggagtggaaaccaccacaccctccaaacaaagcaacaacaagtacgcggccagcagctatctgagcctgacgcctgagcagtggaagtcccacagaagctacagctgccaggtcacgcatgaagggagcaccgtggagaagacagtggcccctacagaatgttcatag

SEQ ID NO: 1160 - DNA, 1443 bp, Artificial Sequence
  Synthetic Polynucleotide
atggacatgagggtgcccgctcagctcctggggctcctgctgctgtggctgagaggtgcgcgctgtcaggtgcaggtggtggagtctgggggaggcgtggtccagcctgggaggtccctgagactctcctgtgcagcctctggattcaccctcagtagttatggctttcactgggtccgccagactccaggcaaggggctggagtgggtggcagttatatcatatgatggaagtaataaatactatgcagactccgtgaagggccgattcaccatctccagagacaattccaagaacacgctgtatctccaaatgaacagcctgagaggtgaggacacggcggtgtattactgtgcgagagtttactatggttcggggacttattataaaaaccgctactactacggtatggacgtctggggccaagggaccacggtcaccgtctcctcagcctccaccaagggcccatcggtcttccccctggcaccctcctccaagagcacctctgggggcacagcggccctgggctgcctggtcaaggactacttccccgaaccggtgacggtgtcgtggaactcaggcgccctgaccagcggcgtgcacaccttcccggctgtcctacagtcctcaggactctactccctcagcagcgtggtgaccgtgccctccagcagcttgggcacccagacctacatctgcaacgtgaatcacaagcccagcaacaccaaggtggacaagaaagttgagcccaaatcttgtgacaaaactcacacatgcccaccgtgcccagcacctgaactcctggggggaccgtcagtcttcctcttccccccaaaacccaaggacaccctcatgatctcccggacccctgaggtcacatgcgtggtggtggacgtgagccacgaagaccctgaggtcaagttcaactggtacgtggacggcgtggaggtgcataatgccaagacaaagccgcgggaggagcagtacaacagcacgtaccgtgtggtcagcgtcctcaccgtcctgcaccaggactggctgaatggcaaggagtacaagtgcaaggtgtccaacaaagccctcccagcccccatcgagaaaaccatctccaaagccaaagggcagccccgagaaccacaggtgtacaccctgcccccatcccgggaggagatgaccaagaaccaggtcagcctgacctgcctggtcaaaggcttctatcccagcgacatcgccgtggagtgggagagcaatgggcagccggagaacaactacaagaccacgcctcccgtgctggactccgacggctccttcttcctctatagcaagctcaccgtggacaagagcaggtggcagcaggggaacgtcttctcatgctccgtgatgcatgaggctctgcacaaccactacacgcagaagagcctctccctgtctccgggcaaatag

SEQ ID NO: 1161 - DNA, 696 bp, Artificial Sequence
  Synthetic Polynucleotide
atggcctgggctctgctgctcctcaccctcctcactcagggcacagggtcctgggcctcctatgagctgactcagccactctcagtgtcagaggccctgggacagacggccaggattacctgtgggggaaacaacattggaagtaaaaatgtgcactggtaccagcagaagccaggccaggcccctgtactggtcatctatagggatagcaaccggccctctgggatccctgagcgattctctggctccaagtcggggaacacggccaccctgaccatcagcagagcccaagccggggatgaggctgactattactgtcaggtgtgggacagcagcactgtggttttcggcggagggaccaaggtgaccgtcctaggtcagcccaaggctgcaccctcggtcactctgttcccgccctcctctgaggagcttcaagccaacaaggccacactggtgtgtctcatcagtgacttctacccgggagccgtgacagtggcctggaaggcagatagcagccccgtcaaggcgggagtggaaaccaccacaccctccaaacaaagcaacaacaagtacgcggccagcagctatctgagcctgacgcctgagcagtggaagtcccacagaagctacagctgccaggtcacgcatgaagggagcaccgtggagaagacagtggcccctacagaatgttcatag

SEQ ID NO: 1162 - DNA, 1443 bp, Artificial Sequence
  Synthetic Polynucleotide
atggacatgagggtgcccgctcagctcctggggctcctgctgctgtggctgagaggtgcgcgctgtcaggtgcagctggtggagtctgggggaggcgtggtccagcctgggaggtccctgagactctcctgtgtagtctctggattcaacttcattaacaatggcatgcactgggtccgccaggctccaggcaaggggctggactgggtggcagttatatcaaatgatggaagtaataaatactatccagactccgtgaagggccgattcaccatctccagagacaattccaagaacacgctgtatctgcaaatgaacagcctgagagctgaggactcggctgtgtattactgtgcgaaagtttactatggttcgggaaattattataaaaacaactactactacggtatggacgtctggggccaagggaccacggtcaccgtctcctcagcctccaccaagggcccatcggtcttccccctggcaccctcctccaagagcacctctgggggcacagcggccctgggctgcctggtcaaggactacttccccgaaccggtgacggtgtcgtggaactcaggcgccctgaccagcggcgtgcacaccttcccggctgtcctacagtcctcaggactctactccctcagcagcgtggtgaccgtgccctccagcagcttgggcacccagacctacatctgcaacgtgaatcacaagcccagcaacaccaaggtggacaagaaagttgagcccaaatcttgtgacaaaactcacacatgcccaccgtgcccagcacctgaactcctggggggaccgtcagtcttcctcttccccccaaaacccaaggacaccctcatgatctcccggacccctgaggtcacatgcgtggtggtggacgtgagccacgaagaccctgaggtcaagttcaactggtacgtggacggcgtggaggtgcataatgccaagacaaagccgcgggaggagcagtacaacagcacgtaccgtgtggtcagcgtcctcaccgtcctgcaccaggactggctgaatggcaaggagtacaagtgcaaggtgtccaacaaagccctcccagcccccatcgagaaaaccatctccaaagccaaagggcagccccgagaaccacaggtgtacaccctgcccccatcccgggaggagatgaccaagaaccaggtcagcctgacctgcctggtcaaaggcttctatcccagcgacatcgccgtggagtgggagagcaatgggcagccggagaacaactacaagaccacgcctcccgtgctggactccgacggctccttcttcctctatagcaagctcaccgtggacaagagcaggtggcagcaggggaacgtcttctcatgctccgtgatgcatgaggctctgcacaaccactacacgcagaagagcctctccctgtctccgggcaaatag

SEQ ID NO: 1163 - DNA, 696 bp, Artificial Sequence
  Synthetic Polynucleotide
atggcctgggctctgctgctcctcaccctcctcactcagggcacagggtcctgggcctcctatgagctgactcagccactctcagtgtcagtggccctgggacagacggccaggattacctgtgagggaaacaacattggaagtcaaaatgtgcactggtaccagcagaagccaggccaggcccctgtgctggtcatgtatagggatagcaaccggccctctgggatccctgaacgattctctggctccaagtcggggaacacggccaccctggccatcagcagagcccaagccggggatgagtctgactattactgtcaggtgtgggacggcagtgccgtggtattcggcggagggaccacgctgaccgtcctaggtcagcccaaggctgcaccctcggtcactctgttcccgccctcctctgaggagcttcaagccaacaaggccacactggtgtgtctcatcagtgacttctacccgggagccgtgacagtggcctggaaggcagatagcagccccgtcaaggcgggagtggaaaccaccacaccctccaaacaaagcaacaacaagtacgcggccagcagctatctgagcctgacgcctgagcagtggaagtcccacagaagctacagctgccaggtcacgcatgaagggagcaccgtggagaagacagtggcccctacagaatgttcatag

SEQ ID NO: 1164 - DNA, 1443 bp, Artificial Sequence
  Synthetic Polynucleotide
atggacatgagggtgcccgctcagctcctggggctcctgctgctgtggctgagaggtgcgcgctgtcagatgcaggtggtggagtctgggggaggcgtggtccagcctgggaggtccctgagactctcctgtgcagcctctggattcaccttcagtagctctggcatgcactgggtccgccaggctccaggcaagggcctggagtgggtggcagttatatcacatgatggaagtaataaatactatgcagactccgtgaagggccgattcaccatctccagagacaattccaagaacacgctgtatctgcaaatgaatagcctgggaggtgaggacacggcggtgtattactgtgcgaaagtttactatggttcggggatttattataaaaaccgctattactacggtatggacgtctggggccaagggaccacggtcatcgtctcgtcagcctccaccaagggcccatcggtcttccccctggcaccctcctccaagagcacctctgggggcacagcggccctgggctgcctggtcaaggactacttccccgaaccggtgacggtgtcgtggaactcaggcgccctgaccagcggcgtgcacaccttcccggctgtcctacagtcctcaggactctactccctcagcagcgtggtgaccgtgccctccagcagcttgggcacccagacctacatctgcaacgtgaatcacaagcccagcaacaccaaggtggacaagaaagttgagcccaaatcttgtgacaaaactcacacatgcccaccgtgcccagcacctgaactcctggggggaccgtcagtcttcctcttccccccaaaacccaaggacaccctcatgatctcccggacccctgaggtcacatgcgtggtggtggacgtgagccacgaagaccctgaggtcaagttcaactggtacgtggacggcgtggaggtgcataatgccaagacaaagccgcgggaggagcagtacaacagcacgtaccgtgtggtcagcgtcctcaccgtcctgcaccaggactggctgaatggcaaggagtacaagtgcaaggtgtccaacaaagccctcccagcccccatcgagaaaaccatctccaaagccaaagggcagccccgagaaccacaggtgtacaccctgcccccatcccgggaggagatgaccaagaaccaggtcagcctgacctgcctggtcaaaggcttctatcccagcgacatcgccgtggagtgggagagcaatgggcagccggagaacaactacaagaccacgcctcccgtgctggactccgacggctccttcttcctctatagcaagctcaccgtggacaagagcaggtggcagcaggggaacgtcttctcatgctccgtgatgcatgaggctctgcacaaccactacacgcagaagagcctctccctgtctccgggcaaatag

SEQ ID NO: 1165 - DNA, 696 bp, Artificial Sequence
  Synthetic Polynucleotide
atggcctgggctctgctgctcctcaccctcctcactcagggcacagggtcctgggcctcctatgagctgactcagccactctcagtgtcagtggccctgggacagacggccaggattacctgtgggggacacaacattggaagtaaaggtgtgcactggtaccagcagaagccaggccaggcccctgtgctggtcatctatagaaatagcaaccggccctctgggatccctgagcgattctctggctccaactcggggaacacggccaccctgaccatcagcagagcccaagccggggatgaggctgactattactgtcaggtgtgggacagcagcactgtggttttcggcggagggaccgagctgaccgtcctaggtcagcccaaggctgcaccctcggtcactctgttcccgccctcctctgaggagcttcaagccaacaaggccacactggtgtgtctcatcagtgacttctacccgggagccgtgacagtggcctggaaggcagatagcagccccgtcaaggcgggagtggaaaccaccacaccctccaaacaaagcaacaacaagtacgcggccagcagctatctgagcctgacgcctgagcagtggaagtcccacagaagctacagctgccaggtcacgcatgaagggagcaccgtggagaagacagtggcccctacagaatgttcatag

SEQ ID NO: 1166 - DNA, 1443 bp, Artificial Sequence
  Synthetic Polynucleotide
atggacatgagggtgcccgctcagctcctggggctcctgctgctgtggctgagaggtgcgcgctgtcaggtgcagctggtggagtctgggggaggcgtggcccagcctgggaggtccctgagactctcctgtgcagcctctggattcaacttcagtgattgtggcatgcactgggtccgccaggctccaggcaaggggctggagtgggtggcagttatatcatatgatggaggtaataaatattatgcggactccgtgaagggccggttcaccatctccagagacgattccaagaacacactgtatctgcaaacggacagcctgagaactgaggacacggctgtgtattactgtgcgaaagtttactatggttcgggtatttattataaaaacaggtactactacgggatggacgtctggggccaagggaccacggtcaccgtctcctcagcctccaccaagggcccatcggtcttccccctggcaccctcctccaagagcacctctgggggcacagcggccctgggctgcctggtcaaggactacttccccgaaccggtgacggtgtcgtggaactcaggcgccctgaccagcggcgtgcacaccttcccggctgtcctacagtcctcaggactctactccctcagcagcgtggtgaccgtgccctccagcagcttgggcacccagacctacatctgcaacgtgaatcacaagcccagcaacaccaaggtggacaagaaagttgagcccaaatcttgtgacaaaactcacacatgcccaccgtgcccagcacctgaactcctggggggaccgtcagtcttcctcttccccccaaaacccaaggacaccctcatgatctcccggacccctgaggtcacatgcgtggtggtggacgtgagccacgaagaccctgaggtcaagttcaactggtacgtggacggcgtggaggtgcataatgccaagacaaagccgcgggaggagcagtacaacagcacgtaccgtgtggtcagcgtcctcaccgtcctgcaccaggactggctgaatggcaaggagtacaagtgcaaggtgtccaacaaagccctcccagcccccatcgagaaaaccatctccaaagccaaagggcagccccgagaaccacaggtgtacaccctgcccccatcccgggaggagatgaccaagaaccaggtcagcctgacctgcctggtcaaaggcttctatcccagcgacatcgccgtggagtgggagagcaatgggcagccggagaacaactacaagaccacgcctcccgtgctggactccgacggctccttcttcctctatagcaagctcaccgtggacaagagcaggtggcagcaggggaacgtcttctcatgctccgtgatgcatgaggctctgcacaaccactacacgcagaagagcctctccctgtctccgggcaaatag

SEQ ID NO: 1167 - DNA, 696 bp, Artificial Sequence
  Synthetic Polynucleotide
atggcctgggctctgctgctcctcaccctcctcactcagggcacagggtcctgggcctcctatgagctgactcagccactctcagtgtcagtggccctgggacagacgggcaggattacctgtgggggaaacaacattggaagtaaaaatgtgcactggtaccagcagaagccaggccaggcccctgtgctggtcatctataggagtagcaaccggccctctgggatccctgagcgattctctggctccaactcggggaacacggccaccctgaccatcagcagagcccaagccggggatgagtctgactattactgtcaaatatgggacagcagcactgtggtattcggcggagggaccaagctgaccgtcctaggtcagcccaaggctgcaccctcggtcactctgttcccgccctcctctgaggagcttcaagccaacaaggccacactggtgtgtctcatcagtgacttctacccgggagccgtgacagtggcctggaaggcagatagcagccccgtcaaggcgggagtggaaaccaccacaccctccaaacaaagcaacaacaagtacgcggccagcagctatctgagcctgacgcctgagcagtggaagtcccacagaagctacagctgccaggtcacgcatgaagggagcaccgtggagaagacagtggcccctacagaatgttcatag

SEQ ID NO: 1168 - DNA, 1443 bp, Artificial Sequence
  Synthetic Polynucleotide
atggacatgagggtgcccgctcagctcctggggctcctgctgctgtggctgagaggtgcgcgctgtcaggtgcaggtggtggagtctgggggaggcgtggtccagcctgggaggtccctgagactctcctgtgcagcctctggattcaccttcagtagctatggcatgcactgggtccgccaggctccaggcaaggggctggagtgggtggcagttatatcatttgatggaaataataaatactatgcagactccgtgaagggccgattcaccatctccagagacaattccaagaacacgctatatctgcaaatgaacagcctgagaggtgaggacacggcggtgtattactgtgcgagagtttattatggttcggggagttattataaaaaccgctactactacggtatggacgtctggggccaagggaccacggtcaccgtctccacagcctccaccaagggcccatcggtcttccccctggcaccctcctccaagagcacctctgggggcacagcggccctgggctgcctggtcaaggactacttccccgaaccggtgacggtgtcgtggaactcaggcgccctgaccagcggcgtgcacaccttcccggctgtcctacagtcctcaggactctactccctcagcagcgtggtgaccgtgccctccagcagcttgggcacccagacctacatctgcaacgtgaatcacaagcccagcaacaccaaggtggacaagaaagttgagcccaaatcttgtgacaaaactcacacatgcccaccgtgcccagcacctgaactcctggggggaccgtcagtcttcctcttccccccaaaacccaaggacaccctcatgatctcccggacccctgaggtcacatgcgtggtggtggacgtgagccacgaagaccctgaggtcaagttcaactggtacgtggacggcgtggaggtgcataatgccaagacaaagccgcgggaggagcagtacaacagcacgtaccgtgtggtcagcgtcctcaccgtcctgcaccaggactggctgaatggcaaggagtacaagtgcaaggtgtccaacaaagccctcccagcccccatcgagaaaaccatctccaaagccaaagggcagccccgagaaccacaggtgtacaccctgcccccatcccgggaggagatgaccaagaaccaggtcagcctgacctgcctggtcaaaggcttctatcccagcgacatcgccgtggagtgggagagcaatgggcagccggagaacaactacaagaccacgcctcccgtgctggactccgacggctccttcttcctctatagcaagctcaccgtggacaagagcaggtggcagcaggggaacgtcttctcatgctccgtgatgcatgaggctctgcacaaccactacacgcagaagagcctctccctgtctccgggcaaatag

SEQ ID NO: 1169 - DNA, 696 bp, Artificial Sequence
  Synthetic Polynucleotide
atggcctgggctctgctgctcctcaccctcctcactcagggcacagggtcctgggcctcctatgaactgactcagccactctcagtgtcagtggccctgggacagacggccaggattacctgtgggggaaacaacattggaagtaaaaatgtacactggtaccagcagaggccaggccaggcccctgtgttggtcatctacagggatagcaaccggccctctgggatccctgagcgattatctggctccaaagcggggaacacggccaccctgaccatcagcagagcccacgccggggatgaggctgactattactgtcaggtgtgggacagcagcactgtggttttcggcggagggaccgagctgaccgtccaaggtcagcccaaggctgcaccctcggtcactctgttcccgccctcctctgaggagcttcaagccaacaaggccacactggtgtgtctcatcagtgacttctacccgggagccgtgacagtggcctggaaggcagatagcagccccgtcaaggcgggagtggaaaccaccacaccctccaaacaaagcaacaacaagtacgcggccagcagctatctgagcctgacgcctgagcagtggaagtcccacagaagctacagctgccaggtcacgcatgaagggagcaccgtggagaagacagtggcccctacagaatgttcatag

SEQ ID NO: 1170 - DNA, 1443 bp, Artificial Sequence
  Synthetic Polynucleotide
atggacatgagggtgcccgctcagctcctggggctcctgctgctgtggctgagaggtgcgcgctgtcaggtgcaattggtggagtctgggggaggcgtggtccagcctgggaggtctctgagactctcctgtgcagtctctggattcacgttcagtagcaatggcatgcactgggtccgccaggctccaggcaaggggctggagtgggtggcagttatatcaaatgatggaagtaataaatattatggagactccgtgaagggccgattcaccatctccagagacaattccaagaacacgctgtatctgcaaatgaacagcctgagagctgaggacacggctgtgtattactgtgcgaaagtttactatggttcgggaatttattacagaaacaactactactacggtatggacgtctggggccaagggaccacggtcaccgtctcctcagcctccaccaagggcccatcggtcttccccctggcaccctcctccaagagcacctctgggggcacagcggccctgggctgcctggtcaaggactacttccccgaaccggtgacggtgtcgtggaactcaggcgccctgaccagcggcgtgcacaccttcccggctgtcctacagtcctcaggactctactccctcagcagcgtggtgaccgtgccctccagcagcttgggcacccagacctacatctgcaacgtgaatcacaagcccagcaacaccaaggtggacaagaaagttgagcccaaatcttgtgacaaaactcacacatgcccaccgtgcccagcacctgaactcctggggggaccgtcagtcttcctcttccccccaaaacccaaggacaccctcatgatctcccggacccctgaggtcacatgcgtggtggtggacgtgagccacgaagaccctgaggtcaagttcaactggtacgtggacggcgtggaggtgcataatgccaagacaaagccgcgggaggagcagtacaacagcacgtaccgtgtggtcagcgtcctcaccgtcctgcaccaggactggctgaatggcaaggagtacaagtgcaaggtgtccaacaaagccctcccagcccccatcgagaaaaccatctccaaagccaaagggcagccccgagaaccacaggtgtacaccctgcccccatcccgggaggagatgaccaagaaccaggtcagcctgacctgcctggtcaaaggcttctatcccagcgacatcgccgtggagtgggagagcaatgggcagccggagaacaactacaagaccacgcctcccgtgctggactccgacggctccttcttcctctatagcaagctcaccgtggacaagagcaggtggcagcaggggaacgtcttctcatgctccgtgatgcatgaggctctgcacaaccactacacgcagaagagcctctccctgtctccgggcaaatag

SEQ ID NO: 1171 - DNA, 696 bp, Artificial Sequence
  Synthetic Polynucleotide
atggcctgggctctgctgctcctcaccctcctcactcagggcacagggtcctgggcctcctatgagctgactcagccactctcagtgtcagtggccctgggacagacggccaggattacctgtgggggaaacaacattggaagtaaaaatgtgcactggtaccagcagaagccaggccaggcccctatactggtcatctataggaataccaaccggccctctgggatccctgagcgattctctggctccaactcggggaacacggccaccctgaccatcagcagagcccaagtcggggatgagtctgactatttctgtcaggtgtgggacagcagcactgtggtattcggcggagggaccaagctgaccgtcctaggtcagcccaaggctgcaccctcggtcactctgttcccgccctcctctgaggagcttcaagccaacaaggccacactggtgtgtctcatcagtgacttctacccgggagccgtgacagtggcctggaaggcagatagcagccccgtcaaggcgggagtggaaaccaccacaccctccaaacaaagcaacaacaagtacgcggccagcagctatctgagcctgacgcctgagcagtggaagtcccacagaagctacagctgccaggtcacgcatgaagggagcaccgtggagaagacagtggcccctacagaatgttcatag

SEQ ID NO: 1172 - DNA, 1443 bp, Artificial Sequence
  Synthetic Polynucleotide
atggacatgagggtgcccgctcagctcctggggctcctgctgctgtggctgagaggtgcgcgctgtcaggtgcaggtggtggagtctgggggaggcgtggtccagcctgggaggtccctgagactctcctgtggagcctctggattcaccttcagtggctatggcatgcactgggtccgccaggctccaggcaaggggctggagtgggtggcagttatatcatatgatggaagtaataaatactatgcagactccgtgaagggccgattccccatctcaagagacaattccaagaacacgctgtatctgcaaatgaacagcctgagaggtgaggacacggcggtgtattactgtgcgagagtttattatggttcggggatttattataaaaaccgctactactacggtatggacgtctggggccaagggaccacggtcgccgtctcctcagcctccaccaagggcccatcggtcttccccctggcaccctcctccaagagcacctctgggggcacagcggccctgggctgcctggtcaaggactacttccccgaaccggtgacggtgtcgtggaactcaggcgccctgaccagcggcgtgcacaccttcccggctgtcctacagtcctcaggactctactccctcagcagcgtggtgaccgtgccctccagcagcttgggcacccagacctacatctgcaacgtgaatcacaagcccagcaacaccaaggtggacaagaaagttgagcccaaatcttgtgacaaaactcacacatgcccaccgtgcccagcacctgaactcctggggggaccgtcagtcttcctcttccccccaaaacccaaggacaccctcatgatctcccggacccctgaggtcacatgcgtggtggtggacgtgagccacgaagaccctgaggtcaagttcaactggtacgtggacggcgtggaggtgcataatgccaagacaaagccgcgggaggagcagtacaacagcacgtaccgtgtggtcagcgtcctcaccgtcctgcaccaggactggctgaatggcaaggagtacaagtgcaaggtgtccaacaaagccctcccagcccccatcgagaaaaccatctccaaagccaaagggcagccccgagaaccacaggtgtacaccctgcccccatcccgggaggagatgaccaagaaccaggtcagcctgacctgcctggtcaaaggcttctatcccagcgacatcgccgtggagtgggagagcaatgggcagccggagaacaactacaagaccacgcctcccgtgctggactccgacggctccttcttcctctatagcaagctcaccgtggacaagagcaggtggcagcaggggaacgtcttctcatgctccgtgatgcatgaggctctgcacaaccactacacgcagaagagcctctccctgtctccgggcaaatag

SEQ ID NO: 1173 - DNA, 696 bp, Artificial Sequence; identical to SEQ ID NO: 1171
  Synthetic Polynucleotide

SEQ ID NO: 1174 - DNA, 1443 bp, Artificial Sequence
  Synthetic Polynucleotide
atggacatgagggtgcccgctcagctcctggggctcctgctgctgtggctgagaggtgcgcgctgtcaggtgcaggtggtggagtctgggggaggcgtggtccagcctgggaggtccctgagactctcctgtggagcctctggattcaccttcagtggctatggcatgcactgggtccgccaggctccaggcaaggggctggagtgggtggcagttatatcatatgatggaagtaataaatactatgcagactccgtgaagggccgattcaccatctcaagagacaattccaagaacacgctgtatctgcaaatgaacagcctgagaggtgaggacacggcggtgtattactgtgcgagagtttattatggttcggggatttattataaaaaccgctactactacggtatggacgtctggggccaagggaccacggtcgccgtctcctcagcctccaccaagggcccatcggtcttccccctggcaccctcctccaagagcacctctgggggcacagcggccctgggctgcctggtcaaggactacttccccgaaccggtgacggtgtcgtggaactcaggcgccctgaccagcggcgtgcacaccttcccggctgtcctacagtcctcaggactctactccctcagcagcgtggtgaccgtgccctccagcagcttgggcacccagacctacatctgcaacgtgaatcacaagcccagcaacaccaaggtggacaagaaagttgagcccaaatcttgtgacaaaactcacacatgcccaccgtgcccagcacctgaactcctggggggaccgtcagtcttcctcttccccccaaaacccaaggacaccctcatgatctcccggacccctgaggtcacatgcgtggtggtggacgtgagccacgaagaccctgaggtcaagttcaactggtacgtggacggcgtggaggtgcataatgccaagacaaagccgcgggaggagcagtacaacagcacgtaccgtgtggtcagcgtcctcaccgtcctgcaccaggactggctgaatggcaaggagtacaagtgcaaggtgtccaacaaagccctcccagcccccatcgagaaaaccatctccaaagccaaagggcagccccgagaaccacaggtgtacaccctgcccccatcccgggaggagatgaccaagaaccaggtcagcctgacctgcctggtcaaaggcttctatcccagcgacatcgccgtggagtgggagagcaatgggcagccggagaacaactacaagaccacgcctcccgtgctggactccgacggctccttcttcctctatagcaagctcaccgtggacaagagcaggtggcagcaggggaacgtcttctcatgctccgtgatgcatgaggctctgcacaaccactacacgcagaagagcctctccctgtctccgggcaaatag

SEQ ID NO: 1175 - DNA, 696 bp, Artificial Sequence
  Synthetic Polynucleotide
atggcctgggctctgctgctcctcaccctcctcactcagggcacagggtcctgggcctcctatgacctgactcagccactctcagtgtcagtggccctgggacagacggccaggattacctgtgggggaaacaacattggagataaaaatgtgcactggtaccagcagaagccaggccaggcccctgtgctggtcatctataggaataacgtccggccctctgggatccctgagcgattctctggctccaactcggggaacacggccaccctgaccatcagcagagcccaagccggggatgaggctgactattactgtcaggtgtgggacagcagcactgtggttttcggcggagggaccaagctgaccgtcctaggtcagcccaaggctgcaccctcggtcactctgttcccgccctcctctgaggagcttcaagccaacaaggccacactggtgtgtctcatcagtgacttctacccgggagccgtgacagtggcctggaaggcagatagcagccccgtcaaggcgggagtggaaaccaccacaccctccaaacaaagcaacaacaagtacgcggccagcagctatctgagcctgacgcctgagcagtggaagtcccacagaagctacagctgccaggtcacgcatgaagggagcaccgtggagaagacagtggcccctacagaatgttcatag

SEQ ID NO: 1176 - DNA, 1443 bp, Artificial Sequence
  Synthetic Polynucleotide
atggacatgagggtgcccgctcagctcctggggctcctgctgctgtggctgagaggtgcgcgctgtcaggtgcagctggtggaatctgggggaggcgtggtccagcctgggaggtccctgagactctcctgtgcagcctctgggctcaacttcagtaactttggcatgcactgggtccgccaggctccaggcaaggggctggactgggtggcagttatatcatatgatggaggtaataaatactatgcagactccgtgaagggccgattcaccgtctccagagacaattccaagaacacgctctttctgcaaatgaacagcctgagagctgaggacacggctctgtattactgtgcgaaagtttactatggctcgggcagttattataaaaagaggtactactacggtatggacgtctggggccaggggaccacggtcaccgtctcctcagcctccaccaagggcccatcggtcttccccctggcaccctcctccaagagcacctctgggggcacagcggccctgggctgcctggtcaaggactacttccccgaaccggtgacggtgtcgtggaactcaggcgccctgaccagcggcgtgcacaccttcccggctgtcctacagtcctcaggactctactccctcagcagcgtggtgaccgtgccctccagcagcttgggcacccagacctacatctgcaacgtgaatcacaagcccagcaacaccaaggtggacaagaaagttgagcccaaatcttgtgacaaaactcacacatgcccaccgtgcccagcacctgaactcctggggggaccgtcagtcttcctcttccccccaaaacccaaggacaccctcatgatctcccggacccctgaggtcacatgcgtggtggtggacgtgagccacgaagaccctgaggtcaagttcaactggtacgtggacggcgtggaggtgcataatgccaagacaaagccgcgggaggagcagtacaacagcacgtaccgtgtggtcagcgtcctcaccgtcctgcaccaggactggctgaatggcaaggagtacaagtgcaaggtgtccaacaaagccctcccagcccccatcgagaaaaccatctccaaagccaaagggcagccccgagaaccacaggtgtacaccctgcccccatcccgggaggagatgaccaagaaccaggtcagcctgacctgcctggtcaaaggcttctatcccagcgacatcgccgtggagtgggagagcaatgggcagccggagaacaactacaagaccacgcctcccgtgctggactccgacggctccttcttcctctatagcaagctcaccgtggacaagagcaggtggcagcaggggaacgtcttctcatgctccgtgatgcatgaggctctgcacaaccactacacgcagaagagcctctccctgtctccgggcaaatag

SEQ ID NO: 1177 - DNA, 696 bp, Artificial Sequence
  Synthetic Polynucleotide
atggcctgggctctgctgctcctcaccctcctcactcagggcacagggtcctgggcctcctatgagctgactcagccactctcagtgtcagtggccctgggacagacggccaggattacctgtgggggaaacaacattggaagtaaaaatgtgcactggtaccagcagaagccaggccaggcccctgtgctggtcatctatagggatagcaaccggccctctgggatccctgagcgattctctggctccaagtcggggaacacggccaccctgaccatcagcagagcccaagccggggatgaggctgactattactgtcaggtgtgggacagcagcactgtggttttcggcggaggggccaagctgaccgtcctaggtcagcccaaggctgcaccctcggtcactctgttcccgccctcctctgaggagcttcaagccaacaaggccacactggtgtgtctcatcagtgacttctacccgggagccgtgacagtggcctggaaggcagatagcagccccgtcaaggcgggagtggaaaccaccacaccctccaaacaaagcaacaacaagtacgcggccagcagctatctgagcctgacgcctgagcagtggaagtcccacagaagctacagctgccaggtcacgcatgaagggagcaccgtggagaagacagtggcccctacagaatgttcatag

SEQ ID NO: 1178 - DNA, 1443 bp, Artificial Sequence
  Synthetic Polynucleotide
atggacatgagggtgcccgctcagctcctggggctcctgctgctgtggctgagaggtgcgcgctgtcaggtgcagctggtggagtctgggggaggcgtggtccagcctgggaggtccctgagactctcctgtgcagcctctggattcaacttcagtagctgtggcatgcactgggtccgccaggctccaggcaaggggctggagtgggtggcagttatatcatatgatggaactaataaatactatgcggactccgtgaagggccgattcaccatctccagagacaattccaagaacacgctgtatctgcaaatgaacagcctgagagctgaggacacggctgtgtattactgtgcgaaagtttactatggttcgggtatttattataaaaagaactactactacggtatggacgtctggggccaagggaccacggtcaccgtctcctcagcctccaccaagggcccatcggtcttccccctggcaccctcctccaagagcacctctgggggcacagcggccctgggctgcctggtcaaggactacttccccgaaccggtgacggtgtcgtggaactcaggcgccctgaccagcggcgtgcacaccttcccggctgtcctacagtcctcaggactctactccctcagcagcgtggtgaccgtgccctccagcagcttgggcacccagacctacatctgcaacgtgaatcacaagcccagcaacaccaaggtggacaagaaagttgagcccaaatcttgtgacaaaactcacacatgcccaccgtgcccagcacctgaactcctggggggaccgtcagtcttcctcttccccccaaaacccaaggacaccctcatgatctcccggacccctgaggtcacatgcgtggtggtggacgtgagccacgaagaccctgaggtcaagttcaactggtacgtggacggcgtggaggtgcataatgccaagacaaagccgcgggaggagcagtacaacagcacgtaccgtgtggtcagcgtcctcaccgtcctgcaccaggactggctgaatggcaaggagtacaagtgcaaggtgtccaacaaagccctcccagcccccatcgagaaaaccatctccaaagccaaagggcagccccgagaaccacaggtgtacaccctgcccccatcccgggaggagatgaccaagaaccaggtcagcctgacctgcctggtcaaaggcttctatcccagcgacatcgccgtggagtgggagagcaatgggcagccggagaacaactacaagaccacgcctcccgtgctggactccgacggctccttcttcctctatagcaagctcaccgtggacaagagcaggtggcagcaggggaacgtcttctcatgctccgtgatgcatgaggctctgcacaaccactacacgcagaagagcctctccctgtctccgggcaaatag

SEQ ID NO: 1179 - DNA, 1404 bp, Artificial Sequence
  Synthetic Polynucleotide
atggacatgagggtgcccgctcagctcctggggctcctgctgctgtggctgagaggtgcgcgctgtgaggtgcagctggtggagtctgggggaggcttggtaaagcctggggggtccctgagactctcctgtgcagcctctggatttactttcagtaacgcccggatgggctgggtccgccaggctccagggaaggggctggagtgggttggccgtattaaaagcaaaactgaaggtgggacaagagactacgctgcacccgtgaaaggcagattcaccatctcaagagatgattcaaaaaacacgctgtatctgcaaatgaacagcctgaaaaccgaggacacagccgtgtattattgtacctcgtatagtggggtctggggccaagggacaatggtcaccgtctcttcagcctccaccaagggcccatcggtcttccccctggcaccctcctccaagagcacctctgggggcacagcggccctgggctgcctggtcaaggactacttccccgaaccggtgacggtgtcgtggaactcaggcgccctgaccagcggcgtgcacaccttcccggctgtcctacagtcctcaggactctactccctcagcagcgtggtgaccgtgccctccagcagcttgggcacccagacctacatctgcaacgtgaatcacaagcccagcaacaccaaggtggacaagaaagttgagcccaaatcttgtgacaaaactcacacatgcccaccgtgcccagcacctgaactcctggggggaccgtcagtcttcctcttccccccaaaacccaaggacaccctcatgatctcccggacccctgaggtcacatgcgtggtggtggacgtgagccacgaagaccctgaggtcaagttcaactggtacgtggacggcgtggaggtgcataatgccaagacaaagccgcgggaggagcagtacaacagcacgtaccgtgtggtcagcgtcctcaccgtcctgcaccaggactggctgaatggcaaggagtacaagtgcaaggtgtccaacaaagccctcccagcccccatcgagaaaaccatctccaaagccaaagggcagccccgagaaccacaggtgtacaccctgcccccatcccgggaggagatgaccaagaaccaggtcagcctgacctgcctggtcaaaggcttctatcccagcgacatcgccgtggagtgggagagcaatgggcagccggagaacaactacaagaccacgcctcccgtgctggactccgacggctccttcttcctctatagcaagctcaccgtggacaagagcaggtggcagcaggggaacgtcttctcatgctccgtgatgcatgaggctctgcacaaccactacacgcagaagagcctctccctgtctccgggcaaatag

SEQ ID NO: 1180 - DNA, 729 bp, Artificial Sequence
  Synthetic Polynucleotide
atggacatgagggtgcccgctcagctcctggggctcctgctgctgtggctgagaggtgcgcgctgtgacatcgtgatgacccagtctccagactccctggctgtgtctctgggcgagagggccaccatcaactgcaagtccagccagagtgttttatacagttccaacaataagaactacttagcttggtaccatcagaaaccaggacagtctcctaagctgctcatttcctgggcatctacccgggaatccggggtccctgaccgattcagtggcagcgggtctgggacagatttcactctcaccatcaacagcctgcaggctgaagatgtggcagtttattactgtcaacaatattatagtattccgatcactttcggcggagggaccaaggtggagatcaaacgaacggtggctgcaccatctgtcttcatcttcccgccatctgatgagcagttgaaatctggaactgcctctgttgtgtgcctgctgaataacttctatcccagagaggccaaagtacagtggaaggtggataacgccctccaatcgggtaactcccaggagagtgtcacagagcaggacagcaaggacagcacctacagcctcagcagcaccctgacgctgagcaaagcagactacgagaaacacaaagtctacgcctgcgaagtcacccatcagggcctgagctcgcccgtcacaaagagcttcaacaggggagagtgttag

SEQ ID NO: 1181 - protein, 5 aa, Artificial Sequence
  Synthetic Polypeptide
  X (1)..(1): N, S, D, G, T, or R
  X (2)..(2): C, N, Y, S, or F
  X (4)..(4): M or F
XXGXH

SEQ ID NO: 1182 - protein, 7 aa, Artificial Sequence
  Synthetic Polypeptide
  X (2)..(2): A, N, D, S, or Q
  X (3)..(3): S, T, N, I, F, or A
  X (4)..(4): N or V
RXXXRPS
